United States Patent Application Publication US 2025/0295137 A1 - sequence listing, part 3

SEQ ID NO: 3 - DNA, 2024696 bp, Latilactobacillus curvatus
  source 1..2024696: mol_type = genomic DNA
tcgacacagtagatctttgaaaactgaacaaagtttcgacaaaccaaatgtgtagggtcgcccttcggggcacaagacatatttgcaaagtcaatttcgctagcaaataaattaagtaacaaaacaagagctacaaacttttaatcgagagtttgatcctggctcaggacgaacgctggcggcgtgcctaatacatgcaagtcgaacgcactctcgttagattgaagaagcttgcttctgattgataacatttgagtgagtggcggacgggtgagtaacacgtgggtaacctgccctaaagtgggggataacatttggaaacagatgctaataccgcataaaacctagcaccgcatggtgcaaggttgaaagatggtttcggctatcactttaggatggacccgcggtgcattagttagttggtgaggtaaaggctcaccaagaccgtgatgcatagccgacctgagagggtaatcggccacactgggactgagacacggcccagactcctacgggaggcagcagtagggaatcttccacaatggacggaagtctgatggagcaacgccgcgtgagtgaagaaggttttcggatcgtaaaactctgttgttggagaagaacgtatttgatagtaactgatcaggtagtgacggtatccaaccagaaagccacggctaactacgtgccagcagccgcggtaatacgtaggtggcaagcgttgtccggatttattgggcgtaaagcgagcgcaggcggtttcttaagtctgatgtgaaagccttcggctcaaccgaagaagtgcatcggaaactgggaaacttgagtgcagaagaggacagtggaactccatgtgtagcggtgaaatgcgtagatatatggaagaacaccagtggcgaaggcggctgtctggtctgtaactgacgctgaggctcgaaagcatgggtagcaaacaggattagataccctggtagtccatgccgtaaacgatgagtgctaggtgttggagggtttccgcccttcagtgccgcagctaacgcattaagcactccgcctggggagtacgaccgcaaggttgaaactcaaaggaattgacgggggcccgcacaagcggtggagcatgtggtttaattcgaagcaacgcgaagaaccttaccaggtcttgacatcctttgaccactctagagatagagctttcccttcggggacaaagtgacaggtggtgcatggttgtcgtcagctcgtgtcgtgagatgttgggttaagtcccgcaacgagcgcaacccttattactagttgccagcatttagttgggcactctagtgagactgccggtgacaaaccggaggaaggtggggacgacgtcaaatcatcatgccccttatgacctgggctacacacgtgctacaatggatggtacaacgagtcgcgagaccgcgaggtttagctaatctcttaaaaccattctcagttcggattgtaggctgcaactcgcctacatgaagccggaatcgctagtaatcgcggatcagcatgccgcggtgaatacgttcccgggccttgtacacaccgcccgtcacaccatgagagtttgtaacacccaaagccggtgaggtaaccttcgggagccagccgtctaaggtgggacagatgattagggtgaagtcgtaacaaggtagccgtaggagaacctgcggctggatcacctcctttctaaggaataatacggaaaaccttgtacatttgcgaagtcgaaactttgtttagttttgagaggtctactctcaaactttgttctttgaaaactggataataagtaatatattagttttaaaagccgagaaaacattgcgttttaaagagttttttaatagaaatatgaattagttcatatcgctaaactcaaataataaccctttaccgtaggtaaagttaggttaagttataaagggcgcacggtggatgccttggcactaggagccgatgaaggacggtactaacaccgatatgcttcggggagctgtaagtaagctttgatccggagatttccgaatgggggaacccaatacctttagtcgggtattatcattaagtgaatacatagcttaatgaaggtagacgcggggaactgaaacatctaagtacctgcaggaagagaaagaaaaatcgattccctaagtagcggcgagcgaacggggaagagcccaaaccaagaagcttgcttcttggggttgtaggacagaacattggagttaccaagttaagttgtaatcgaatcagctgggaagctgagtcaaagagtgtgataaccacgtagattaaacaacttaacctccgttctggatcctgagtacggcggaacacgtgaaattccgtcggaatccgggaggaccatctcccaaggctaaatactccctagtgaccgatagtgaaccagtaccgtgagggaaaggtgaaaagcaccccggaaggggagtgaaatagatcctgaaaccgtgtgcctacaattagtcaaagctcgttaatgagtgatggcgtgccttttgtagaatgaaccggcgagttacgtttatatgcgaggttaaagtgaaaagctggagccgtagcgaaagcgagtctgaaatgggcgagtgagtatatagatgtagacccgaaaccaagtgacctacccatgtccaggttgaaggtgtggtaaaacacactggaggaccgaacccacgtcagttgaaaatggcggggatgaggtgtgggtagcggtgaaattccaatcgaacttggagatagctggttctctccgaaatagctttagggctagcctcggaatattggatcatggaggtagagcactgtttggactaggggcccgtcatgggttactgaattcagataaactccgaataccattgatttagttccgggagtcagactgcgagtgataagatccgtagtcgaaagggaaacagcccagatcaccagttaaggtcccaaaatttatgttaagtggaaaaggatgtggcggtgcacagacaactaggatgttggctcagaagcagccaccatttaaagagtgcgtaatagctcactagtcgagtgccgctgcgccgaaaatgtaccggggctaaacataataccgaaactgtgggtggacacgtaagtgtccgcggtaggagagcgttctaagggcgatgaagctagatcgtaaggactagtggagcgcttagaagtgagaatgccggcatgagtagcgaaagatcagtgagaatctgatccaccgtatgactaaggtttcctggggaaggctcgtcctcccagggttagtcgggacctaaggcgaggccgaaaggcgtagtcgatggccaacaggttgagattcctgtactagtttattttgtttgaacgatggagggacgcaggaagctaaggaatgcacacgactggaaatgtgtgtctaagcaacaagtcttgagttgagtgaaatgcttgattctttaaggacaagttgtgatggggagcgaaattaagtagcgaagttcctgatgttacactgccaagaaaagcttctagtgagaaataaactacccgtaccgtaaaccgacacaggtggtcgaggagaatatcctaaggtgagcgagtgaactctcgttaaggaactcggcaaaatgaccccgtaacttcgggagaaggggtgctgaccgtcaggtcagccgcagtgaataggcccaaacaactgtttatcaaaaacacaggtctctgcaaaatcgaaagatgacgtataggggctgacgcctgcccggtgctggaaggttaagaggatgagttagcgtaagcgaagcccagaattgaagccccagtaaacggcggccgtaactataacggtcctaaggtagcgaaattccttgtcgggtaagttccgacccgcacgaaaggcgtaatgatttgggcactgtctcaacgagagactcggtgaaattataatacccgtgaagatgcgggttacccgcgacaggacggaaagaccccatggagctttactgtagcttgatattgagtgtttgtacagtttgtacaggataggtaggagccgtagaaatcggaacgctagtttcgatggaggcgttggtgggatactaccctaactgtatgaccactctaacccgcgccacttagcgtggcgggagacagtgtcaggtgggcagtttgactggggcggtcgcctcctaaagtgtaacggaggcgctcaaaggttctctcagaatggttggaaatcattcgtagagtgtaaaggtataagagagcttgactgtgagattgacaaatcgagcagggacgaaagtcggacttagtgatccggtggttccgtatggaagggccatcgctcaacggataaaagctaccctggggataacaggcttatctcccccaagagtccacatcgacggggaggtttggcacctcgatgtcggctcatcgcatcctggggctgtagtcggtcccaagggttgggctgttcgcccattaaagcggtacgcgagctgggttcagaacgtcgtgagacagttcggtccctatccgtcgcgggcgcaggaaatttgagaggagctgtccttagtacgagaggaccgggatggacatacctctggtgtaccagttgtgccgccaggcgcatcgctgggtagctatgtatggacgggataaacgctgaaagcatctaagtgtgaagcccccctcgagatgagatttcccattcctttatggaagtaagacccctgaaagatgatcaggtagataggctaggagtggaagtacagcgatgtatggagcggactagtactaatcggtcgaggacttaaccaaaggtgcaatgttaggcttttgaaataaaatattacttattatgcagttttgagagaacgaagttcttctcagtgcgcaagcacaaaatagtgtggtggcgatagcaagaaggatacacctgttcccatgtcgaacacagaagttaagcttcttagcgccgatagtagttggtgggaaactacctgcgaggataggacgttgccgcgctttttcattccggtttagctcagttggtagagcgcatgactgttaatcatgatgtcgtcagttcgagcctgacaaccggagtcattgaacggttgagaatcttcaatcgttttttatttcggcccgttggtcaagtggttaagacaccgccctttcacggcggtatcatgggttcaaatcccgtacgggtcatcaataatgccggcttagctcagttggtagagcatcggtatcgtaaaccgagggtcacaggttcgactcctgcagccggcatcaatagcatgtttctaccaagtgctaatcgtgataatcagcattgtactgacgttttgttagtataatgcttttttaatattcaatttgattgtaaagcaaccactaaaatagccagttacgaaaatcgtaactggctattacttattgttcatttgcccattgccataatagaatctgagtgcgtccagtcatttttttattggctaagatcgtctgtgcttcagcacgattaacccacagggtacttaaggcttcatccacttcaagtgtacggtctgtttgtttagcttgatcaagagtacagattgctagactaacggcgccatcagtaaggcctggtgaggaataacttggcgcaaagcaatgttcaacctcaataagagagtaacctgtttccgccattaactcacgggaaatggcttgttcaatcgactcagttggttcaactaaaccggcgggattaccatagacaaaatcattaaggggctgtctaaattgtttagtcagtaagacctgtgagtgattttgattgtagcagaacattgcaaccgctgaggcattagctggtcgttttaaagtctcgatggttaagttagagtcacgactgacaaaatgataaggcattaaattgccatgttcattttgatacgttgcttcgtagtaagttagccaacgatcaggtcgtaatggaataagagatgttagtgtaaaagaattcatcggaatcagctcgctttctattagttcattgtactactgtttaaaggcaacaaaccagttttctaagaacatgttaggtatcatgagcattttctcatttaagaataagcattagtcattttgaatcataaaataacttgttttaatgaaaaaatcattgcaaacaatgcagttaatgttgaaaaaagaattgatttaagattaaaataagattataatagcctttatagattctaagcgaatgataagagacctcttgtatagatgagtcgattcaatttaataactatcaaattcttagtttccgtaataataaagttttaaagtggggtattacaatggaagagaaacaagaaaaaacattctttggtcaaccgcatgggctatcaacactgttcttcactgaaatgtgggaacggtttagctactacgggatgcgtgcaattctattattctatatgtattttgctttagataagggtggtcttggctttgacaagacgactgcgatgtctgtgatggcaatctatggttcgatggtttacctagccagcgttgttggtggttggttaagtgatcggatctgggggagcttcaaaaccgtcttcatcggtggtgtcttgattatgttaggccatattgccttagcaatgccgatgggtgcgacagctttatttatctcaattgctttgattgttgcagggactgggttattaaaacctaacgtttctgaaatggttggtagtttgtatagtgaaaatgatcgtcgccgtgatgctggtttcagtatgttcgtcttcgggattaacttgggctcatttgtcgctccaattcttgttggggctgtcggtcaaaaaattgattttcacttaggcttctcattagccgctgtcgggatgttctttggtttaatccaatactaccgcggtcgttctcaattcagtaaagaaaattcaaaacctaatgatccaattgcgccagaagaattatcaagcgttattcgtaaaattgtgattggtgtcgtggtcgtcgttgccgtagtattaggcatgcaatttacaggcaacttaaacattgataacatcgtcttgatgatttcaatcattgcgattgcattaccaattgtgtacttctcacggattttgggcagcaagaaagtgactaagaaggaacgttcacgcgttatagcttatattccactctttattgcagctgctatcttctggggaattgaagaatctggctccgttgttctagctttgtttgcagaagatcggacaattctaaacattggtgggcatagcttagctgcatcaaatttccaatcattgaatccactatttattatgcttctaacgccattctttgtatggttatggagtgcttggaagaaacaaccatctgcacctggtaaatttgctgttggtttaatcttcgctggtttatcatacatgtttatggcacttcctggattattacacggcaccgctggccgagttagcccattctggttaatcggttcatggttcatcgttgaaattgctgaaatgttaatttcaccaattgggttgtcaattacaacaaaattagcgccaaaggcattccaatcacaaatgatgagtatgtggttcttagcagatgctgcgggccaagcaattaattcacagcttgtgcgtttatattcaccacaaacagaaattagatatttcttagggattgggattgtgagcgcgatcttcgggatcgtcttaatcttcttcgttaaaccaattcataagttaatggaaggcgttaactaaatattagaaaaaatcttgattatttatgcaataatcaagatttttttgcattttggggttgatttttctgtcagaattttgtaaactaatatagttgaatcgatgagatgaaacgtatggaggagtagcgaagtggctaaacgcggcggactgtaaatccgctccttcgggttcggtggttcgaatccactctcctccacttgattgggctatggccaagcggtaaggcaacaggttttgatcctgtcatgcgctggttcgaatccagctagcccaatactttaaagacatcttgctaagatgtcttttttttgtgtcctggattgactttcctccgctcgttcggtatccttggataaataaaaaaaggggtggcagaatgaaaattggatttattggtgtcggtagcatggcacaagcaatgattaaagggttagtgaaagctgatcaaatcgcaacaacggatattttagtgcacggcggacatccggcgaactatgcggattttgtagctgaacaacggattacagctgttgcggataacaattcagtggttgaacaagccgatatcgtttttttagcggtaaaaccatatattgtgccacaggttttagcagaaacaaatgcagcctttaaagcacatcaaccattgatggtttcaatggcagcaggtttatcacttgataaattagcagaacaatctgctgtagatttaccaattctacgcatcatgccaaatgtcaacgtggctaatcgcgcagggattacagctattgttggtaacgaacaagtcaatgcagagcaattgggtcgggtgaaggatgtcctttcacaactcggtggtgtggttgaaatcggcgaaaaagatttcacaactttcagtgcgcttgccggtagttcaccagcatttgtttacctattcattgattcaatggcgcgggccggcgttaaacacggtttaacaaagaaagccgcaaccgaaattgcagcccaagccgttttagggagtgcccaaaacgtgcttatgagtgatgattcaccttgggacttagtggatcaagtttcatcaccaggtggcacaaccgtcgccggcttattagcaatggaagaagccggcttaatgacagcagtggttaaaggcatcgacgcaacaattgccaaggatttagaaagccaaaaatagagtggtttcaagcatgtaaaaagcgtaacctgatacaaatactgtattgggttacgcttttttatattattttgtaaagtggaccatctcatgacagagttggtgggtgagtaagctactttctggtgggacaggatttgcgccgttagtttcaagggcagtaataaacgcatcaatcattggcgcaaagccacgcgtttcaagcgtaggcgtccagtcagctgcagtttgaatgtgactgtcttctgccgcttgtgttgtgtagcgcgttagattatcgacagtgaataacccgtgcgatgtctggagacttgcaatttcttgattggtaccactttgcatatttaaagtcgcgctgattaattggcgcggtgtttcaatggttaattgcgcgagttgtaaattgccgtttgcatcctgctgacagtatggacggattttgtaattggtacctagtgaatcagccaagaaaagcgccgtatcaatggtatgaatcatcaggtcataaatggcaaagggcgttggttggctcgttgccacgcgtgttttagtgatgttgatcagttgtttatcaggtaagtgatttaatttttgcaaaaatggggcaaaacggcggttgaagccgaccgttaagagccgttctttgctagccgcgagtttgtataattcggcgacttccagtggattttcacttaagggtttatcgacaaaaacgtgtaaaccatggagcagggcttgtttaacatattgatagtgggttgcagttggggtgtgaatgaaaactgcgtcgagtggttgttcgagtaatgtgtcaaatgataggcagccactttctaaatgatattgcgcttgaagctgcgctaatttagccggttggcgcgtacataagacccaatcgacccggtcttgcatctgcgccattacagttaaatatgctttttgtgcaatgtttcctagtccaataacaccgatttttaacatcattaaactcctcgtaagatatatttataagccgttggcttacaataaaatttaattattactttgatactgcgggattcttcagaatataataggaccatggaatggatctatcgggaatttgctaaaaactcctgtagttaactctactttagtaagtccgttacccgagtctttacgctctctcccaactcactagctgttttcaatcaggcttatcttcaatgtagtagtttgaaggcggcataagtccaattggtcaaaattctgttacgcgaggttgtagctgtgtaaagattttctggggaatcccgcagtatcaaagcaagttccaaataactctcgaaaggaggtccttcctgtgaaattatttgttggtttagatattagttctgaaaagattgatgcttgttttatgaccgatgatagcaacttatcaatcctaaatcgtttaagtgttgctaacgatttaaatggtgcttctgaaattaaagccttaattttaaaacatcacgcagaagtatcatttgaacagattgtgattggtatggaatcaacatcactatatagttttcatccagctatgtttttccaagaagatgcagacttaaatgcactaccaacggtagtcactgttgaaaacccatttaaaatcaagcaatattctcgtgtcttcgatgaagacaaaactgataccaatgatgccatgcgaattgctgactacttacgaattcaacgttttacaacgtcacctatcaaagaagaaaaatatatggcacttcaacgtttaacccgtactagatatcaactagttaccgaattagtaacggttaaacaacatttcttagaaaacttaacttataaatgtaatacgcttagtaaggaattaaaatcccaaattgcaagaacaaattagccacacgataaatcctattaaatcagtattttcattaatattcatattttatggacttaacttaaccggcggaagcagcggagaaaagctctttgggtgtttgatagccagtttgccggcgcggtaaattgtttagctttgactcaactgcttggatatcatgaggacccaaaatatccatggatagacccttgggtacatcgcggcggatcattcgattatgcgcttcgttagtcccacgctcagaggaacgatatggatgggcataataaaggtcagcgacaccggtaagtacagcgccaacttccgagaactcagcgccattatcggcagtaactgacttcatgattgatccgtattcttgacagatcttggccagctcatagttgactgaatcggcatcacgaccatcgatcaaacgtagaatttggcagcgggattgacgctcgatcagcgttaagatcacactctcttgaccgttgcgcttgcccaccacggtgtccaattcgaaatggccgaactcttggcgctggtcgatacttttaggccgttcatcaatactccgtccggccagacgcttgtgcttgatcgagtgatgatgtttagcacggtggcgcgttttttcgagtagatcaagattacggacttcaagtaactgggcatcaatatagtggtatagcgtcttggtcgagaccatctcctcaggttgatataagccttcaagtttggcccgtcctactgctgcatcaggcgaccaaccatcttgacgcaaatgagtcgtaaaatagtcgataaaatcagcgacaccgacgagtttcaaaggtcgatgacagtgggctcgattagcttcgtacttagcttgtgctgtttctggtgagtatacagcgtaatattggcgttgaccattcactttttttacttggtcgatctcgccgcggcacaattcattattgattgtttgatgacaaacattaagcgctctggcaattgcacgattggaatagccttggctgtgcagcgtagcaattctgcctcgttcaaacgaagttaggtgctgacctttttttctgactgtggtattctgttcttgcatcaagacaataacctctttcattgtttgtgtaggaacatcaatgataacagagatttgtcttggtgttttttattttatcaattagctaaaagtatttggctaacttgattataaaacgcgcgaaggaattaaaatcagaatctaccggcatttttagcgccacaattgtacatttaatgactgaaaactactcattagatgaattagccaatttaccactagaggacttcgtccaattgattcaaaatgttggccgcagtaactttaaaaatcctgaaaaactggttaaaaccattcagcgtgccattaaaaatagctatcagttgccgcgattaatgaatgagtcgattgatattattctcagtaccttggtagttcaaatgcgttcattacagcaaagtattaaacaaattgataaaggtatcgaaaaactagttgaaataattcctgaatatcaatgcttaaccagtgtgccaggaatcggtaaggtttatgccgcaggtatcttagctgaagtcggtcaaatcgaacgatttgatgatcaagcaaaagtcgccaaatatgccggtctatcctggaaagttaaacaatctggaaattatcagtcagaagtcacaccactaacaaaacaaggtaatcattatttacgttattacttagttgaagccgccaactcggtaaaaaatcacttacctgaatacacagctttttataaaaagaaatataccgaaaccccgataaataagcaccgccgagctattgttttaaccgccagaaaatttgtgcgtttggttgatgcgctactacgcaatcaccaactttacacaccaccaaagagtgtgttgaaggaataacgtagttattcacgcaaatctttggaatacctactaaaatttttatgaattttaagtaggcttagtttagtgttgccaattttgtaaaattacacgatatttatatcaattatcttcttgacttattaccactagacttaatatgaatggataaatatagtatagcaaattaacaagaaaacggttcaaagtttagtcggaatcccttgtttttttggtctataccatttatactagaggtaatttaaagatagaggtggatggataatggcagtaaaagtattaaaacatgcggtaatctatacaggtgacgacgttatcgaagacggttatattcgtttcgatgataaaattttggcagtgggcccaatgttcgactacaaggcacaagctggcgaagaaattcaagacgttaaaggcaagacaatcattcctggctttattgacgttcactgtcacggtggttatggttttgatgcaatggacggcgatgctgaccaaatcgacgaaatggcaactaagatgatgcaaaatgaaggggtcacaaccttatttgcaacaacgatgacgcaatcaaacgaaaacattgctaatgctatgcgcggtgttaaagcagcggctgaaaagaacccattaattcaaggtgttcatttggaaggcccattcatcgcaccaatcttcaagggtgctcaaccagaacaattcatcaaagatccagacgttgatttattggacgaatggaataagttatcaggtaaccgtgtccgtttaattacttatgcaccagaagatcctggttcaaaagcattcgaagactactgcttagcacacaacatcgtgccttcagttggtcatagtaatgcaacgcgtgaacaaatgcttgaaagtaaagcaacgcacgttacccatttatacaatgcccaacgtgaattcaagcaccgcgaacctggcgttacaggtcacgcaatgttagaagacaacatgtacgctgaattaatcgctgatggtttccatatcgtgcctgacatgattaaattagcttacgaacaaaaaggtgcagaacgcatcgaccttgtgactgattcaatgcgggctaaagggattgctgaaggcgaaagcgaattaggcggtcaaaaagtcattgttaaagacaaacaagcacgcttagaagatggcactttagccggatcagtgttaacatatatcgatgccttcaagaacatccaaacattcacaggttgtgaaacgtttgaagccgttatgatgtcaagtgtcaaccaagccgaagaatttggcttaacacaaaaaggtaaattagaagaaggtcgggatgctgatttcaacatcttagaccatcagcaaaacttagtcgcaacttacagctttgggaacggctatcaacattaatatttaggagtgtgtcccatggaatcacctgtttatattcaaattcataatcaacttaaaaaggatattgaagccggcaagtggtcgattggagatcgaattccttcagaacgggagcttgctttaaatttcgaagtctcacgaatgacattacggcaagctgttcaaacattggtcgacgaaggaattttggaacgccgtattggggctgggacatatgtcgctaaccaaaaggtgcaagaaaaaatgtccggcgtcactagttttaccgatctaatgactgcccaaggtaagcagccatctagtaaaaccatttcgttccacattgccaacccatcacttagcgaagttgaaaagctccagttaaaagatggcgagcaggtgctccgcatggaacggattcgctatgccgacaatgtgcccatctgttttgaagtggcaaccgtgccacaaagcttagttgccgatttcagtaaagctgaaatcacgtcttccttctataaagcattagccgaaaaagggggctacgaaatgggcggtgcacaacaaaccgtctcagcccaactcgcctcagaacgaattgccgaatatctcgacattaagcgtaatggcccaatcttgaaattacgacaagtttccttcttatcaaacggcgaacctttcgaatatgtccgcacccaatatgtgggcgaacgatttgagttttatttggaaagataattaaaacgtcctgaaccgataaggttcaggacgttttttttgattgatagccaataaatgtttatatggtagattgtaaaattaatccgaacgctgttcggacaaaaaagatcagcttcctttaaaatggtgtttaccacaaacccatcttttaggagctgatcttttgtctagtataacctattccgaacgaattaaaatcgaaaccttttgtgaactagggctgtccaatatccaaatgggcgttcggctgaaccgatcaccgtcaacaatttcttatgaattatctcgatgtcaaccttatcaggctgaattagcacaaacagatgccgaatacaagcgatcacgatgtggtcggaaaactaagctgagcgatgagttaaagcaaaaaattctcaaccatttacgtctaagctggtcaccaggaatgattgctcacgaatttaaactagctactaaatctatttataattggctaaatcaggggagaattggtttctccttgaatgatctacctgaacatggcgtacgccaacggcgtaacgttgaccaacgatccaaatataatcaatctttggggcgatcaattgaacagcgtcccatgatgattaatcaacgtaagcgcatcggcgattttgaactagatacagtcgttggtcctcgtgggcatagtaaggcagttttattaactttaatcgatcgcaaatcacggttcctttgggcataccggttaaaagatcggacgacagcgactgttaatgaagcactaactaagttcctaaccacttttaatggtccggtgcacagctttactgtggaccgtggcactgagtttagtgggctagtatcacttgaatcacaatatggtattaagacctattactgccatgcttatacgccagctgaacgtggtagtaatgaacgctttaatcggaatttacgttatttttatcctaaagggactcgttttgagcacattagtgctcaagatttaacgacgacgttactccaaattaaccagcgaccgcttaaaatactcgactggcaaacaccgtatcaggttatgctgacaaatttgtccaaaaattcggattaaatttgcaatctaccatatgattaataatgctgaacagactgtaaaaatattaaagtttatgttaatattctacgtggaagttaattaaggattctagaggggaaaaaatgaatagaaaactaacgaagttcttaattggatttacaatggtctcggcgacctttttgtttgctacaaacaatgttcaagctggacaagtgctaacgccagatgaaatgaaaacgcaactaaatagtcaagatacaaaagaagcaacacctataaaagagaaaaaagcgaagactgacgatattgggatgcctattgattcatctaaggttaaaaaggcgattatgcctaaagcaggttatccaagtgtcaataattatatatatcaacacaacccacgcttcttcaattttttctttgtcaactatccaagtgtcaataattatatatatcaacacaactacttacatccaaacattacgcaagatttgcatacattctcaatatttaattataaaacagatgataatcgtcctaacggagtggttgttcattatactgataaccctaataattatagtgctcggagtgaagcagactatgagattaatggtgggtggcaatcagcatttgttcatacctttattgatgctaggacaatattaaacattcatgatacagattatggtgcatggggtagtggggcagttggtaataaatattttgcccaatttgaaatggtaacggctcgtaacttcgaagattttgctaagacaacgagttactcagcgtggtacactgcttacttgttaaacaaatataatttaacgccatctttggcacagaatcataatggggttggtacaatctggtcacatcataatgttacacaatatcttggtggaacagaccatactgatccagatgcttactttgcaaaatatgggtatgacatgaatcaattttatgcattagtgcaacattattatgatcaaatgcctgcaaataaagcgagccttaacagtgttaatgtgtctgaaaatgaaattcatgtggtgggttggcatacagcacagcaaacagccaatcggccatatagctacctattcttattagatagtaagacacataaagaagtaaaacggtataaaataaatcgtgtaaatcgtcaagatgtgcataacatttatgaaaacattaccaattcattacattcaggatttaacaatacattgacattagataataatatgcataataggagttacgttcttatgtctcgctactcgtcagatcccaacggtaataccgacactgttgatttcacatttagaaatattattaaagtacctaagcaagaaaccagtgtagcaagtatggattcattaactgctgataagaagacattatcaatgtccggttggcacgcatcagtggattctagtcggtatccatacagttatttaattgtaattaatgctaagacaggccgtgaatataagcgctatgcaattaaccgtacgcaacgtgacgatgttcgacaagtttatccgaatattgccaatgcaggaaaaagtgggtttggtttgagtattccagtaacaaatgatatgcgcggtaatacgtataaagtaatttcacgttactcaagtacaccaaatggcgaaggagcatacgtagactattcgtttgataatcaggtaacagtaccagcaattgttaaacaaaatttagggagtattgacaccctaacggcaagtttcaataatgttcacatcagcggttggcaagcaaatgatgatgcacaaggccgtaatgttcacactttaattgtaatggatgctaatacacataaagaaattaaacggatgactatcgccaactcaccaagaaatgatgtagctgctgcttatcccgatctatataaggcggggctgagcggattttctgcagatatcccagttgacagtcaattacaaggcaagaatatttacttcattagtcgttattcagcaacggcaaatgctgatgctgattatgtggattatcaattcattaatcaaattggagttcctaagaaacaagttattgaaagtgctgcaagtatggatcaattgtctcgtgtaaataataccgtaataatgtcgggatggcatgctgctaatgcttcgattaataaaccgtatagttatttaattattatggataagacaacaaacaaagaaattcggcgttataaaattaatcgttctttaagaaatgatgtagctgctgtctatccaacattatacggctctaaaaacagtggatttggtttaacgtttaatatcgataacagtttggttaacaaaagaatatatgtgattagccgttattcagataatccttcaggtgagggaaatacggttgattacgtgtttgacaatgccttgaacatctaaaaaatattgccgaacgtcttaaccgtgtggataagatgttcggtttttatttgtaactaaaacgaaatagtgttttaagtaattgtattgtattattagtatgtctgaaaaaactaactaggagcgacttgtgaagtgaaaaaaattgttaagaatagtattttaatgagtacgattggtttaattggcttaacaacaaatcaacgagtatcagcggctgaacaaaaacaagagacagcccctgcattaatgagcagtaatgaaagtattatatcagcaagtagtcaaagttctaaagaacaaaagccatctaccgataattcaactgaatccggtgtaattaaaaatagtgaatcagcagcagaaacaaagaacaaggaagaagttactgtaaagcaaaataatgaaattggtcctggggtttatgatgcgcctaaagtaagtcaaagaagtacgccagcttcaatgaatttattacgaaatacctccagagcttcaatgaatttattacgaaatacctccagttttattagtagtattcatgatggtgcaatttcgtcatggcgcaagtatggtgtattaccctctgtttcaggtgcgcaggcaatcttggagagcggttgggggcaatcgactttagcaacgtatggtaataacttatttggaattaagggaacatacaatggtcagtacgtaacaatgcccactcaagaatatattaatgatcagtggattacagttaatgcgcaatttagaaaatacaatagttggaatgaaagtatcgaagatcatgggaactttttggcggtaaattcacgatatcataatttgttgtggaaaactaattatcgtgaggtaacgagtcttttgaaacaagacggttatgctacagcgcctaactatgatactttgttaaacagtttgattgagcagtatggattaacaagttgggatcgagaagtaacggataatgtcggtagccttgatcaattaactgcaaatagcaataatatccttgcgcttggttggcatgcaattaatgatgccaataatttaccgtacagttatttaattctaattgataccaatacaggaaaagaacataaaaggattgcaattaatcgtggtaggagagatgatgtagcaaatgcctatccgtctattaacacggcagcaatgagtggtattaatgccaacatcccagtagactcaggaatgtatggacatacctatagggttatatcgcgttatgcacaattaccaagcggtgaagggagtgcaaaagactttgatttcggtaatactgtaaaagttcctgcgccaactaagcaaaatttaggtagtttggataacgttaaagttaattcaaataaaatttcaatgaatggttggcatgcgagtgattatgcacaagggaaaaatacgcattatctgattgtaatgaatgtcgatactaataaagaaattaagcgcttgaaagttaataattcattgagaaatgatgttcatagtgtatatcctaatgtgtataattctggtatgagtggttttagtgctgaattagcggtggataagagtttagaaggcaagaatttctacgttattagtcgctatacaagtaccacgaatggtaacagtgattatgttgactatcaatttcctaatgttgttaacgtaccacaaggcccaagtaatttaggaagtattgatcaacttatccaaaatggtaatatcctccatatttcgggatggcatatttctaagaacgttcaaggcttaaataataattttatcatcataatgaataaagcaaataataaagaaattggacgggttcgcattaataggattactcgaaatgatgtcgcagctgtctatccaactgttgataatgcggcgcagagtggcttcgatattaaagtttctgtcgatgctaaactgaagcagaagaatatttatttaatcagtcgttattccaatagtaatagtggagaaggccgatatgtggattatcaatttattaattcgttgaatattaaatgataaaagttgaaaaactttgtttatgtttaaaattgtagaaccctaatgagatacaagggatttgaaattttaagtgtaggcgaagtttttttatttattaaaagatagtggactattaatggcaatattggggtatcatgttaattgttatattaaagaaagcccgagggggatatatatatatatcatgagtaaaaatagaaaatctattttgagtgtaatgttattaataataatattattagctattcttgtaggattgtctgcctacgaggggctatatgctcctatgtcaataaatggcacatctttttctaaacactcgttctaattctgtcggaattaaaccaactgatgtaatttgaggttcggattaccaagtcctcaaaattggaaaaagttgtttgaaaggcaaactctctcttcaacaatgagtgaaaagcttcaattggcccattatcataaggataaccttgttttgagtatgagtggctaatctgatgccgttcaagtaaagtttcaacttcgttgctggtgtactgtgaacccatgtcagagtgaaaatattgtggcttttgatgatattcaagcgcctgattaatcgtttctacaactaacgtcgcctccatctgacgaccaatcttgaaagcaagaacttgatgaacctttggttcgtaaatagaactgagataaacccaggttcctggacgtaattccaaataagtaatgtcagcacgccatatccttgcattgggctggtgcttgattaaattggggcgttgtgaatgatccacatgagtgccaggttttttaaatcgccgattcattaaagagtgaatctccatttccctcattaatcgtaaaattcgttttgacccaacacagatgcctgacttgcgaagcaccatcgttattcgtggataaccataggcacgataattattttcccaaatcaatttaattttttctttgagttgattatcaacacgttcgtgttgactaggttgatatcttttccaatggtaataggtgctgcgcggtaatttcagtgccgaaagaataattgataagcggtgtcgcaataactgatcttctatgaagacaaggcaattaattcgtcctaatgctttcccagtaacaccgccgcagcttttaaaatttcgagttcctcctttaatcgctgattttccttttgaagttgtttgaattctttggacgttacttcagtaccgtcttctagctcaactgatttagcgcctttaacccagttatgaattgcggctggagaaacaccgtattcctcggaaagcgagcgaatagatcttttctcttcacgatgcatcttcacaatgctggctttaaaatcatcttgatatcgtttcattggaatgctcctatcttgttttattaattatggcacaactgttcagaaatttatgtaccaaatactaggataggagcaacttagcacctaatatttcggcacctctaaatgaatcttctatctttccgcaaacatatattgtggacttaaagcatacacttcatccattagcgcttacggatttaaatgcaagaacatggaatatagggaccctttttctaatattggcctttattgcaattatttatctaattgtaagaagaaaagataacgacggttattatgcatttgtaggaattatcggactcttactagtgattggtggattcgattttgtgaattgggattttacagaacaccttaaaatatttgagcctattaaagtaattcaatttttgggtagattattaatgttagcggctatattcttagtggtaccggttatgcgtatgatgattaaagtcaaggcgttgtgggcgaaatggctaataggtgttccaataataatctttctaattaatggtatgatgacaatttatagaactcagaatttttatcaggagatagtgccgactaatattttagaaagtgggtataataatcagctgcatactattgattattttccggctttttctggaccaaaaagcggtgtggactatgcggttaaagctgcgtatagtgatattaaaggaccgattatgtttggaaattcagtgccatcctttaatagtgcaacatatcatatgaggatcaaacacgtagttatgaataaatatttagtgacgccagtagcggcctataatagatttaactatcgggtgacaattgatggacagacagtaaaatggattcataaccaaacatacggaacaatcgcaattagttctaacgaattagtaaataaaaaaaaggctaagctttgtgttgttgcaaaaccattgaaaaatgagtggttagtaatgatcattgcgggcatagcaaatatggctgttatgttgaggttgattttggattttaaacggaaataggtacaacactgactagtgtcatgcaataataataagatggatactatgagtttaggaatcatggtattgaggccaaaaaagttggaggatttcacatggagaaaataactaaaaaaaaggaaatatgggcgattattttaattgttattttattaatagcgctaaatttatcgattaatttaacaggaaatgggatcacacccaatggtggcgatgataaggcgtttgctcaatttgttctaggaaaacactatctacaatttttacatagtcgatatacgggatggtcttctcgactagtaattgaatcggtattatcaacattaacgcacttaccaattctgtggcgattattaaacacattggcaatgtttactgttatctatatcccgtatctattgcttcttaaaggaactgatgatgatgagaatgctagtcgtctattgattagttttgggatgttcttcttattacctttcaatatgttctacgagacagggtggatggcaaccacaaccaattacctatgggttttagctgccggtttattagcgatgctaccttccttagctcaatatttaggaatagacattaaacataaaaaaataatttcagttgttgctttcttagccttaatctatgctgttaatcaagaacaaatggtaattatcctattattgggtaattcattgttattgtacgtaacaagaggaaataaaaaggcactggggagattggcatttcaattcgtagttactgtattgtctttgattatgattgttttagcaccaggaaatagcgttagaaaagtcaaagaaattcattggttaccattatttccaactttgtcaccctttaaaaaaattgagttaggtatttctagtacattaggtcacttctttttttcatttgatgtgcttgcgacaatacttgtgattttactttttgcgttttatataaatcagaaggggagatataaaataccgcgtacagttttctatattccggtactgttcagcgtgattttttggtttaaagatactttgattggaaaaatttatccaggattaaagaaaatggggggtgctgttactatttatgggacagatatctctttggccaatttacaatctatcttgccagatttacttctgattgtagtaagctgcattgttttattggggatattttcttcgggaaactctaaacgaatgtggttagttatggtagctatgttactcggacttatttcgagaatcatgatggggttttcaccaacaatttgggcatcaggagaacgaacattcctatttttatatgaggcacttatttttggttgcttctatttatatgatcaaattgagaaaaagaaagaatatcaaattttaacgcacattttaattggaattggtggcctagctttctgtgttattttatatacagtttaatgagtttgtagacaataacaggttatccgtgagaaactgaagttaaaattggatacagatatataataggcactttcgataaatataaaatttaaatcggaagtgtttttaatttggctaataattgatacccctatgaaactaagctagaatgcattaggattttaaacttaggtatgagtggtggttaggctggaaaagcgacgtgctagtttatacttggcgcacgtagttacctaattttacttttatttatttgtttcaaaaaatggttgcagtttcgtttaaagaggctttccattgtaatctcaagctaataattgaagattttataaagtctagaaatctttaaagaattccttagatttacaggtaacgaatagtggttagacactgtttatgctacaataaaatagattattttaaattactaagaaacggagttaagttaaatggaaaatggtgtgggatttaaatctgtgggtgttgtttttaaaaaatattggtgggtcatttttgtaacaattatcattggtggcgctgttgggatcatgactgccaaatcaacaattagttacgaaacaacagctaaagtatatgttaacaaggggtatgtcgaagacaaaaaaggtaacggtatttttgataacgatgttgagcgtttttggcaatcaattaatagtttaagtaagacacaaagctttaaaaaggctatgactaaagaggttagagattattcaagcgataatttgttaattgatagtagcaacggatctaaagtcatagctgtgaaatatactggcgctacgcaagccaagagtattaaaggtgctaagtatgcgacagagcttttgaaaaaagaagtgatcaagtatgatgacgagaagagtaagttagttgtgattgaccaggcttcaaaagatacaactgcaacaataggctttagtaataagaaaacaaattctattatgggcatcatctatggtgcagtattgggcttcatcctcagtgctattcattttattgttatgcgtagaaagaattaggagggaacgatttggttaatccgttctttatgttcattctggctttttcagcagttattctaagtttcttttttggctggtccagtatttatccaagtttttcgagtgatgttattttcttttttattgtaatgttcttgttagccggcgtactaggatactttatctataaaagtaatgtgatatcttttaagaaaattaagagtacaacaaatgttgtttggttagtggttattgttttaataggcacattagctgaaggagcctacaatcatggttttccattacagtttatgctccaaggtaaggattccggttatacagaatttggaattccgacagttcacgtttttttactcactctgacagcttttttaacaacctacttgtggcatctaatcctctcttcaactgggaagttgagaaatcaatatatactactttgtgttctaagttgtattccgtatgttttagaagttaatcgcggaatgttcatgatggtgatgataaactgttttaccatttttattctagcaatctggaagaaaattaaagttagacatataattggtttagcgattttcggtatggtgggtctgtttttatttggtgttatgggaaatgcacgagtgaacacgtcatatcaaaatggtcgatcagcttttgattcagcgtcaattatgcaaatcggtggtgcaactgaaaaatttaaaagtagtaagattcctaaggagttcttttggggttatatttacgcttcatcacccgtggctaactttcaaaaaaatgtagattatagcaagactactgaaaaaataacagtttcaaaagtaaatagtatgttttttggtgagttactgcccaatttcattggtaagagagcacttgctaattcagattataaagaggtcaaaattcaacaaattacaccagaattgaatgtcgggacagcattaagtagtccttaccgtttattggggtggattggtgttactatgtacgtcattattatctttgcgggtgcatacgtgtatctgtacttcttatataagttgaattcaagatttttcattgtcgggttatccgtcttaaatacaatatttgcattaactatttattcaaatatgattcaagcaactggtttgagcttacaactagcatatccaattatatttgcactaatcgactcatacgcagattattctaataagagttacttgaaaatttaggaggattttgatggagacaattagtttcatcctaccaatctatggtactgaaaattcaattttagaggctgggttggaacgcttaaagttggcgaagacaacttcatttgaattcttactaataagtgatggcgctagagatgatttagtagcaatttgtagacgcttttcagaagaagacaagcgttttaagttgattgaacaagctaatcagggcgtatcggttgccagaaatacggggattaaagctgctaagggaacttggctgctttttgttgatccggatgacttattagcagagaaatttgaagaaatattgttagaaaaagcaagtactaacgcagatgttatcttttttggttttgatcgagtatatcaagacggtaaagttgaaaatagttttcctaaagataagctatttcccgctacaccggtatcaatggatgatttaattcgtgcaacgctttcggatggcgcttattataatggcatttatggatattttcttggaacaccatgggccaaaatgtttcgaaagtcttttttagaagctaatcaattattttacccagcaggaattattaagagagaagatgcgttatttagcattgaggttttcttgaagaaccctagaattaacattgttgattcgatactgtatcactatagaattgatcatgataattcaattagtaatagttaccgacaaggggttaaggaaagtttcattacagtttcgaatgatctgaacgatgatttagtagattggttacaacaatcagataacgcattatttttggattcttatatgttgagactctcgattgaactcttgtttgcagatttttgtaatctaagcaactctaagtcatatcaggaaagaaaaaatgagtttaagacttatctagaaacgcctgttgttagtaagcaaataaaaaatgcgagattagtcaatatgccaatgaaacagaaactattaggattactgattaagcagagaaatttctatttattaaattatttattgtttaaaagaaagcgtggataagaatttgaaagttgcagcagttattgtgacccataatcgtagggataaattagaaaaggcgattgatagtttattagagcagtccgcgccagttgaaaaaatagtggttgttgataatcaatcaactgatgatacgctagattttttgaaagcaaaagcgcgcgataacgcacaaattaaagtcattcattcagaagataatttgggtggcgcaggtggctttaatatggccttggcggcaactcttgagttgcctgaaattgattggattagtatcgctgacgatgatgcagtctatgatcaagattatatgaagaaaatggctgaacttagtgaaaaacatgccgatatcggttgtcttacaggaactgttatcgaagatggtgaaattggaaccgaacatcgtgttaaaattgatgatttggaccggctacaattatctaaaattgacttaacgagctatgaaggtaattttccagttgatattgctacttttgtaggagtttttttgagaaaagatgtgctaaagaagattggcttaccggaaaagaatttctttatttggtatgatgacattgaatactcacttcgtattcgcaaggaaacagaaatgatcaataatatccaagctaagatttatcatctaacagataataatagtgtcggagcaagtggtgttaatcgtccaattggctggaaggactactatggttatcgtaatcgttggcaaactatgaagttacattgtgagaaccaacaaattctagctaagcaattacggtatgaacatttcagatatgcaatgggtgcctttttaaagaaaaaaggccaatattctagatttgctgccgtcaaactagttaatacagcctacaaggattttaaaaatgaaaaaatgggtaagaatgatgcattcttaccgttttaaatgaaagatttggtgagacagagtgactaatatttctgtttgcatggcaacttataatggtgtcaaaaccttacccaaacagataaaatcaattatcaagcaattaaccgcgcaagatgaaattgtgattatcgatgattgttcatcggatgatacaatggggttactgagggagttgttggtcaattttaacgggcaaacaattctgaaaagaaacgatcagaatatgggaccaattaaatcgtttgagaaagcactaggacttgcgacaggcaatcttgtttttctttctgaccaagacgatgaatggcatgatgataaagtggaaattattcaagatgcttatgtaaatgggcacgctgatttaattgtccatgatgcaactgttattggaaagaatggagaggttgttgatcagtcatggaatcactacaaccataaccaagttgaccaaagtgtatttagtaatttaattaaaaatggttatactggtgccatgatggctatttcgagacgattattagatgccgcgttgccttttccagaaaaaatcgaaatgcatgatcagtggctgtttcttgttgctaaaaagaatcattttaaaattacggcgacttctgctactttaatggactatgttcgacacggtggtaatgtcactggcatgagtaagagaaacaaaaaagaaatgttgattggtcgcttaagaatgctgaatacttatttaaagatgaaggagtcctcaaaatgaaaggtattattctagcaggcggttctgggacacgtttgtatcccatcacacgcgctttatcaaaacaattgattccaatctatgacaaaccaatgatttactatccaatgtcagtgctcatgttggccgggattcaagatattatgattatctcaaccccaactgatacaccacggtttaaagaattatttggcaacggcaatgacttagggttaaacatcgaatacgccgttcaagaacaacccaatggtttggcagaggctttcgtgattggggcggacttcatcggcgatgattcagtatgcttaatcttaggtgacaacatctattatggtggtggcctttcagaaatgctccaaagagcggctcaaaaagaatcaggcgcaaccgtttttggttatcatgtgaatgatccagaacgctttggcgttgttgattttgatgaaaatatgcatgctaaatcaatcgttgaaaagccagaacatccggcaagtaactatgcggtgactgggttatacttctacgacaaccaagttgtcgacattgcgaagaatattaaaccttcaccacgtggcgaactagaaattacagacatcaacaaagcgtatcttgaaaaaggccagctagatgttgaattaatgggccgtgggtttgcttggttagatactggaacccatgattcattacaagaagccagcagttttattgcgaccgttcaaaaacggcaaaacttgaaagtggcgtgtctagaagaaattgcttaccgcatgcactatatcgataaagcaaaagtgattgaattggcacaaccactcaagaaaaacgactacggtcaatatttattgcgattagtaaaagaagattaggggtaagtaatcatgggtaagttaaaagtcacaacaactaaattacaagacgttaaaattattgaaccagccgtctttggtgatcatcgtggattctttacagaatcttattcagatcgcgatttcaaagaagcgggcattgatattgatttcattcaagataatcactcactttcaacgcaagcaggcgttttacgaggcttacatttccaacgcggtaaagctgcgcaaacgaaattaattcgcgtggtgactggggctgtcttagatgtcatcgttgacgttcgtgcaggttcaccaacttacaaacaatgggaagggtacatcctttctgccagtaatcaccgtcaattacttgttccaaagggcttcgcccatggctttgtcactttgacggataacgttaacttcttgtataaatgtgatggctactatgatgcagaagctgacggcggtatttcattcaagacaccagaattaaacatcgattggccaattgattttgaccaagcaattacgtctaaaaaagatgctaaccaaccaacctttactgaatttgaaaaagataatccgtttgtttacggtgaaatttaaggagatcgacacactatgaaaaatattattgttaccggtggggccggctttatcggttctaacttcgtgcattatgtggtgaataaccacccagaagttcacgtgacggttttagataaattaacttacgctgggaaccgtgcgaacttggccggtttaccagcagaccgtgtggaattagttgttggcgatatctgtgacgctgaattagtggatcgcttagtccaaaagacagacgcagtggtacactatgctgccgaaagtcacaacgataattctttgaaagatccttcaccctttattcaaacgaacatcatcggttcatatacgttgatcgaagcttgtcgcaagtataatgtgcgttatcaccacgtttcaaccgatgaagtatacggtgatttaccattgcgtgaagacttaccagggcacggcgaaggcgttggtgaaaaattcactcctgaaacgcgttataacccaagtagtccttattcatcatcaaaggcgagctcagacttgttagtccgggcatgggtgcgttcattcggcctacaagcaaccatttcaaactgttcaaataactacggtccttatcaacacattgaaaaattcattccccgtcaaattaccaatattttaagtgggattcgaccaaaactttacggttcaggtcaaaatgtgcgtgattggattcatacgaatgatcactcaagcgccgtatgggcaatcctaaccaaaggcaaaatcggtgaaacttatttaatcggtgccgacggcgaacaaaacaataaagatgttttggaattaatcttagaattaatggggcaacccaaagatgcttatgatcaagttaaagaccgtccgggtcatgacttacgctatgccatcgattcaacgaagttacgggaagaattaggctggcaaccagaattcactgattttaaatcaggcttacaacataccatcgactggtatcgtgacaatgaagactggtggcaagcagaaaaagcagccgtggaagccaactacgctaaaaacggtcaataatgtggatgtattatctaggatattgaaagatatggagcaattatgaaaaagacgcttaacaatataatctacaacggtatttaccagttgttgatactggcattgccaattatcacagtaccgtatgtagcacgtgtcttgggtgcaagagcactagggagttattcattcattacgtctatttccatgtttctgagttttgtgattttgatggggatgaatcaattaggttcaagaattattgcccaatcccacaaagataaaggtgaactaggtagtaactttgtacagttatggaaaatacagtttttagtaggttgtttagtgattctggcgtatacgttctttgcaatgttcagtgaatataaaacatacttgctattgaatattccatatttaattggattcgcaattgacatttcctgggtcttcataggattaggagaagttagaaaagttgttgttcgaaataccttaattaaaatatgttctgttgcaatgatttttatatttgtaaagaaacctagtgatttaggttattacgtattaattaatagtttaagcatcttttttgcaaatattattttctggcttaatttaaaggggatcatcacaaaagtaagttttaaagggttcttttctaagtcaatctttttaaaagaagccatgattttagttatcccacagcttgcagttcaattttataccaattttgatagtacgctagtaggttggattgcagggcctgtccaattaacttattacgatcaatcacaacggattgcgcgaatgttagtaacacttattacttcagttagtaccattttaatgccaagaatggtccaacttcgaatgaatcatgctaataatgaaaaagtggatcagttattaaaaacatcacttgactatacattattagttgcacaactgtttactatgttactaatggtaaatgcatccgaatttgtaccgtggttttatgggaaatcatatacaccaatgacgaataatatgttatgggtcggtttaataatgatttttatttcctatggtgaagtatttggcagtcaattctcattggtcaatggtgattataaacaatatgcaattccggcaattgtgggtgcggtaattagtgttattttaaatgtgatttgtgttaatatctggggagcggatggcggaacggcggttattattttaaccgagtttatcgtatgttctatgagaatttacatggttcgtaaagaagcagatttacggtatctagttcatgaacagcttaggtatgtacttgcttttctaatgaccgttcttgctgtcctgaattttaaaattgtgttacctagtttgttcttaacaatggtagttaattcaattattgtgacaattgtatatgtattgctacttgtattattgagaactagaattaacagagatattgtcagattagtaaagaaagttactcgttaattaatgattgagataataatttagatttaggagaaaataatatgactaattatttagtagtcggttccggactctttggcgcaactttcgcatacgaggcggccaaacgtgggaaccacgttaaagtaattgaaaaacgcgaccacatcgctggtaatatctatacaaaggaaattgatggcattcaagttcaccaatatggggcccacattttccatactagcaacaaagaaatctgggaatacattaatcaatttgcagagtttaaccgttacaccaatagtccagtcgctaactacaaaggtgaaatctacaacttgccatttaacatgaatacgttcaataagttatggggtgtggcaacacctgccgaagcggccgctaaaattgcggaacagcgcaaggtgttgggcgataaagaaccagaaaacttggaagaacaagctatttcattaattgggacggatatttaccaaaaactaatcaaagggtatactgaaaagcaatggggccaaaaggctaccgaattaccatcatttattattcgtcgtttaccagtacggttaacgtatgataataattatttcaacgatacataccaagggattccaattggtgggtatacacaaatcattgaaaaaatgttggctagtgatttaatcgatgttgaaacgggtgttgatttcttcgataagaaacaagactacatcgatcaatacgataaagtcatctttaccggtatgattgatcaattctttgattatcaattaggggaactcgaatatcggagtttacgctttgaaaccgaagaaatggacgttgataactaccaaggaaacgcggtcgttaactatacagatgccgaaacgccttatacacgggtgatcgaacataaacactttgaatttggtaaaggcgataagaataaaacaatcgtgacgaaggaatatcctgcgaactggtcacgtggtgacgaaccttattacccaatcaataacgacaaaaataaccgcttatacaaagcataccgcgatttatcggtgacagaacccaaagtggtcttcggtggccgtctagggcaatatcgttactacgatatgcatcaagtgattcatgcggcattacaagttgttaaggatgaattaaaatagaggagatttattctatgaaaattttaatcactggtgcaaatggtcaattagggaccgaattacggcacttattagatgaaaatcaaattgaatacgtggggacagatgctactgagttagatattactgattcagcggcagtcacaacttacttcgaaaagaataagccggaattggtttatcactgtgctgcttatacagctgtcgatgctgctgaagaagaacctggcaagtcaatcaattacaaagtgaacgtggttggaacgcaaaacattgccaatgctgctgaagcaatcggcgcaacgcttgtttacattagtacggattatgtctttgatggtacgaatgatcaaatgtacacagaagaaaccccagctgcacctaagaatgaatatggtcgcacaaaattggctggtgaagaagccgttgcaaatacaatgagcaaatactacatcatccggacttcatgggtctttggtgaatatggtaagaacttcgtttacacgatgttaaatcttgcgaagacgcatgatcatttaacagtcgttagtgatcaagtcggtcgtccaacttggacccggacgttggctgaattcatgttatacgctgttcaaaacgacgtgccgtatggcttgtatcaactttcaaatgacaattcatgtacttggtatgaatttgcgagcgaaatcttgaaggataaagacgtagaagtgagtccggtaacatcagacgaatatcctcaaaaagcattccgtccaagacattcaatcatggatttgacgaaggtcaaggcaactggttttgaagtaccaacctggcaagtggcattacaaaaatttatggcaaaaattgattaggatgagatgatgagtaataatctggataaaacggtgacgattagtattgtgacctataatagtcaatacgtctttaagacgttagatagtatcaaggcaactgtcttggggcaatacccggtaaaagtattggttcatgataatgggtcaacacctgagtatttggcgcaattaaaagcctatgctgcagatgatgttgaaatcattgaaggccaagagaatcttgggttcggtcatgggcataatgccaacctgaagctgacggcatccgattattttctgatttgcaatccggatattattttaaatcaaaacgcatttgaacagatgtatcggattttagcggatcaagatgctaatgatagcttagggatgctaacaccgaagattgttggtccggatggtacgacccaacatttagtacggcggaagctggatgtcttcgattatatgctacgctttgtaccttttaaatgggttaagaagctatttgaaaagcgcttggcggcttatgaatgccgggatttaacgaatcgacgacaagtgattcaatatggatctggtgcgttcatgtttacgcggactgatgtgattcgggctattgatggtttcgatgaacgcttctttatgtatttcgaagataatgacctttgtgatcgaattaaccaaagcggtcatacgattttatatgtaccagacgcggttgtcactcatttttatggaatggcatcccaccgcagtttcaagggatttaagatcttcttgaagtccatggcacagtattttaataaatggggttggcgtttcttctagtctcaaacaaaaaagacggttttctgaagtgaacccttaaaattggacaaattgttaagctgctttttgaacggcgagttctcggtattttaccgggggcttgccgtttaattttgttttgatacgacggttgttatagaagtctatccaatctttcattgcttgaattaggctagttttatcttcaaaatgttcatccatcatttctgctttcataatatgaaagaatgactccattactgcattatcaaggcaagtcgctttacgagacatactttggaatgcatgatgttctttcaagagcgttcgccattggcgatgttgatactgaaagccttggtcagtatgaactgttgtccgataatttagtgccggaagtccttctaaagcttctttgagcggtttaatggcgaattcaactgttggatgttcacttatattaaatgctaaaatttctccagagaataaatctagtaccggttccaaataaacgcgttcatttgttcccatagatccatatcgaaattcactgacgtctgctacaagtttttgatagggtctgtcggtcttaaagcgacgctttaaccgattaggggcaatcctaccaactaatcctttatacgagttatatttacgagtttggcgattaaaggcatgacatatccaggcatgttcttgcataatacgtaaaacccgcttgtgatttatctgaaatcctaaatcatgcagagcacttgtaattcgacggtacccgtacttctttgtgtattttaaatcttgttgtcgaatttcatcaattgcttgaataacttgatcgtcattgaattttcgaccttcatgatttcgagtgtagtaatacgtgctacgcggtattttaattactttgagaatcaatttaattgatacttggaatatttgcctcaactcagtcgctattttcgagatttcctttgtgctgattttttccgagctaaggcttctaatttttttaagtattcattctcaatcttcaacatttgattctctttttggagttgctttaaagtatcttttgttgttgagttgtccttttggacaactggtttagcgttctcattcttgtgttttgccatatttttcgagttgcctcgctttcgctcaagcccttcaattcctaatgtctcaaatcgcttttcccattgccaaattgtacttggcgaggataaattaaagtgtaaggcggttactggaagtgaggcctgattttgtttcctccagtttaatacatcaactttaaactgactagtgtattctaagtccatggcttttggctgaagtcctttaataccaaatctttcaaatcgctgaatccaaattgaaacggtagccttgctgccaatcccatactttctcgctagtgaataagctgcctgaccacttaaatactcggtgacaatcttaactttaaaatcgaaattaaatttactcataaatgaaacccccaaaattggatttttctgtccaaccttgggggttcactttattctaccgtcttttttgtatgcctcttttattttatgatatagttataccaaatatatctctaattaggagtgcgacatgcaaaaattatatcctgatgatagtttgttgttacatacagacttgtatcagctcaatatgatgttaacttattttaaaaagggactccataatcggacagcggttttcgaatgctatttcagaaaactaccttttgaaaatgggtatgctatttttgctggcttagaacatatcgttaattatcttgagaatctccgctttaccgagagcgatttagcttatttacgggatgaagtcggctatcctgaggattttttgacgtatctagcagaattagattttgatttaacgattcgttcagccgttgaaggtgagcttgtttttgggaatgaaccgattttacaaatcgaaggaccattggcgcaatgtcagttaattgaaacggccttgttaaacatcatcaattatcaaacactaatcgctacgaaagctgcacggattaaatctgtggtcggtaaggatcctgttttggaattcgggacgcgccgtgcccaagaactggacgctgccttatggggcactcgggccgcttatatcggcggttttgacgctacaagtaacgtacgcgcttcaaagatttttgggattccagccagtgggacgcatgcgcattcactcgtacaagtctatcgcaatgattatgaagcattccgcgcttatgctgaaacgcatcacgattgtgttttcttggtggatacgtatgacactctcaaaagtggtgtgccaagtgcgattcgggtcgctcaggaatttggtagcaagattaacttccaaggggtgcggattgatagtggcgacatggcctatatttcaaaacgcgtgcgccaacaattggacgaagccggttttaccgatgctaaagtttacgcttcaaatgatttagatgaaaagaccatccaaaacttgaagatgcaagaagccaaaattgacgtttggggtgtcggcacgaaattgattacggcttatgatcaacccgcgctaggggctgtctataagcttgtttcgattgaaaacggcgacggaaagatggtcgataccatcaagctttcaagtaatgttgagaaagtttccacaccagggcgcaagcaagtttggcgaatcactaaaaaagttgatggtaaatctgaaggggattacattacgctttgggatgaagatccactggaacaagattcaatttatatgttccacccaaattacacgtacattaataaaactgtgacggactttaatgcgcggccaattctacggatgatttttgaacacgggcaacgcgtttacaaattgcccgaacttggcgcgattaagaagttctgtagtgaaaatctcgactcgttatgggatgaatacaagcgggacttgaacccgcaagattacccagttgacctttcacaacgcacatgggatcacaaaatggcccaaatcagaagagtcaaagaagaagtccaaaatcagaatggttcattcaacggttagcttttgagtgtagtgaagtctggtgaataagtgcgctagcgcttatttgccggacaaagctgttgaaggaagcgcgtttcaaaaaagttagcaatctaacatttaaaaaaggtggtatttaatcatgagacctttacaagctgaaattatcgcagccttaaagacccaacctacaatcgatccgaaagcggaaattcgacggtcagttgattttctaaaagattatttaaaaaagaatacatttttaaaaacatacgtcctcgggatttctggtggccaagattcaacattagtcggtgctttagctgaacaagcggtccgtgagatgcgtgctgaaacgggtgatgaaacctatcaattcatcgctgttcgattaccatatggtgaacaggcagacgaatcggatgcaatggctgccattgatttcatgcaagcggatcaggtccggcgtgtgaatatcaaagcgtcagtggatgcaatggttcaagcactggcggaaacagaagtgacagtcagtgattttaataaaggtaatatcaaggcacgtgtgcggatgattgcgcaatacggtatcgctggtgaaatgaagggtgcggttttaggcacggatcattctgctgaatcaattaccggtttctatacgaagttcggtgatggtggtgctgatctcgtaccgattttcagattagataagcgtcaaggcaaagcgatgctggcggaattaaaggcaccaaaacacctttacgaaaagattccaaccgccgatcttgaagaagaccgcccagcattgccagatgaattagcactcggtgtcacttataatcaaattgatgattatttagagggtcgtgaagtggcagaagaggctgctaccaagattgaaaagtggtaccaaaagacagcgcacaagcggcatttaccaattactgtttttgatacattttggcgttaatcggctggattttgtttatccgctaaattaattggacgtcagaataatgttttacttgcgttttagattggttctgtcttataattagtttaacgataagggagtaactggcagcttgtctgcgataacgccaccaacaaggcaatattctggtgttatcttaattagtgagacttatgggggattctttgaattctctataggtctctttttttaccccgaaatctatctataggaggcacgacaatgacagatcaaccaagttcattctttacccaatcaacggatgagactttaaaaagtttagccacaacaactgatgggctaacgcaagaccaagttgctgaacgactcgctaaatacgggcgtaatcagttgactgagactaaacgaaaaagcttgttcgttcgttttttagaacagttcaaagatttcatgattatcgtcttattagtagcggcaatgattgccggctttttagcacatgaatggccagatgcgattattattctcgccgttgttatcttgaatgccgtttttggtgttttccaagaagccaaagcggaacaagcaattgatgctttaaaagagatggcaaccccggacgcacatgtacgccgtaacgggcagattgttaaaatcaagagtgaagaactggttgtcggtgatatcgtgctattagaagcgggcgatatcgtcccagctgatttacgcttgttagaatcagcggctttgaagattgaggaatcggctttgacgggtgaatcggtaccggttgataagactgttgcaacgttaaccgatcctgaaagtgggattggcgatcggaccaacatggcattcatgaatagtaatgtgacttacggtcgtggtgtcggggttgtgacgggcactgggatgcaaactgaagttggtaaaattgctgggatgttaaatcaagctggtgaaaccacaacaccattgcaaatgaatttaagtcaacttggtaagagtttaacgattatgattttaatcattgcggctgttgtatttgtggtcggctacttacgccacgcgcaatcaccaattaatatgttattaacctcaatctcattagcggttgccgcaattccagaaggattaccggcaattgtgacggttattttagcccttgggacacagaagatggttaaacgaaatgcgttggtacggaagttacctgctgtggaaacactggggagtaccgacattattgcgtccgataaaactgggacgttaacgatgaatcaaatgacggtagaaaagatttttaccaataatcagttgcaagaagcatcagccgacttggcaggcgatgatttagcgttaagcattatgaaccttgccaacgatacgaaaatcacagaggatggccagttaattggtgatccaacggaaacggctttaattgcttatgggcgtgataaaggtttcgtgatccaagatgccctagcagcagcaccacgcgtgggtgaagtgccgtttgattcagaacggaagctgatgacaacgattcatcaagccaaagatggtcaattattaatgaccactaagggtgcaccggatgaattactcaaacgcgtgagccactttgtcgatgccaatggcgatgttcaaccgttagatgaagatgaacggcaatttttactcaaaacaaaccacgatttagctaaacaagcgttacgtgtcttggcattagcgtataaaccgttagatagcttaccagcaacaattgatccgacgattgaagatgagttaatctttgctggtttagtcgggatgattgatccagaacgaccagaagccaaacaagctgtaactgatgcgcattcagcagggattcggacgttaatgattaccggtgatcaccgggatactgcagaagccatcgcccttcgtttagggattattacacctgaacaagatgcggatgcggccgttgtgacaggtgccgaactggatcaaatggatgacgagacatttgctaaaaaagtcagtcagtacgcagtttatgcgcgagttgcgccagaacataaggtgcggattgttagagcttggcaaaaacatggtaaagtcgttgcgatgaccggggatggtgtcaatgatgcgccagccttgaagtccgcagatatcgggattgggatggggattaccgggacagaagtatcaaaaggcgccagtgatatggtgcttgccgatgataacttctcaacgattgtcgtggctgttaaagaaggtcgtaaagtctttgccaacattcaaaaatcaattcaatatttattgtcagctaacctaggtgaagtccttaccttattcatgatgacgattttaggctggcaaattctgcaaccggtgcacatcttatggattaacttagtgacggatacattcccagcgattgcgttgggggttgagcccactgaaccggggattatgaatcaaaaaccacgtgggcgcaagtcaaacttcttctccggcggtgtcttccaagcgattatctatcaaggtctcttagaaggtgggattacgcttggtgtgtatgccttagcgattacgtacccagtgcatcaagcgagcggcttagcacatgctgatgcgttaacgatggcctatgcaacgttagggatgattcaactcttccacgcgtttaacgtgaagtcagtgcaccaatcaatctttacagttggctttttcaagaataaagctttcaactgggctgtcttagcttcattcctcctgttagccgcaacgattatggtacctggcttaaacggcctattccacgtgtcacatctcgatattcaccaatggggaattgtcctagcagcctcattctcattgattgtgattgtggaaattgtgaagttcttccagcggagaatggctaaataatttgttgccgaccttgtaaagtgcttgtcaattaaactataataaaggtgattaaataacttttatgttagtgagttttgtagggaggattacgtatgcaaatattcttacagtttctgatatcacttttcatctttggtggtctggaacggattactcacgttcaaaataattggttgttgagtttcttactttatttagttattttcgcttgtatcgacttattgacaaagttaatgtttggtcagtcgtggacgagtagaatgttgaagagaagataggtaataatcgacgctagtgacaaacgagattttgtcgctagcgtttttttaatgaggtaaatgtcctttgatgaactaagcatgccttttctattaatgacacatgctttaatattttaattgcaagccgattgggaaattagtatactaaaccataggaaactaggaggatggacatgaataaaacgcaacaaaagcttgccaaatacggccaagctgtcaacgatttaatcgataatactgaaaaagtacaagaagggatgagtaagtatttcacccctttaaaagcagccgttgctgatggtaagttagccgaaatgagcgaacaagactatcaaaagacagcacaaatcttcagagatggtgttgatcaatatcacgaattcttagcacaattcaaaacagttgttgcgcccgctcgtttgatggggaacaaccaacgtttaatcggtgcttacgctgatttcattcaaggctgtgaagatttaattacaagcatgcatgatgatcaaaccgttgatatgcaagcttttgcagcttcagaaatgaatcaagacaaagcaacggaacggatttctaaatacatccaaaatatttcaagaatcgcttagggcgaaagttgacagttcccaagtcgggggctgtttttttaattgaagcaaaaggagtgcaatcagatgcctgatattcaaaatcttgtgattcaacaattaacacagtatcgaccacaacaaatcaaagcaacgttaggtcttttagaagaaggcaataccgtaccgtttgttgcgcggtatcgaaaagaacgaacgggaagcctcgatgaagttcaaattcgtgaaattgaaagcacatttcaatacttaacgacgctcgaaaaacgtaaaaccgatattttgaaaaatatcgctgaacaagaaaaattaacgccaaaactcaaacaacaaattgaaacggcaacgcaactgcaagctttagaggatctgtacttaccctataaacaaaaacgacggaccaaagcaaccatcgctaaagaagccggcttggaaccttttgcgcagtttatcgcagggttacctagcttaaccgaacaagcattattggcaaaagctgaagcttacctcaatccagatcaaaaaatcaatgatacagctgctgttttagctggtgttcatgaaatattggcggaaaatattagtgaaacagcaaaatatcggaattgggtgcgccaatatacttggcaaaatggtcagttggccagtcaagttaaagacgaagcagccgatgagaagcaagtttatcaaatctattatgatttcactgccgatttaacgaaggtagcggaacatcaatatttagcgattaatcgtggtgaaaacgaaggtattttgaaagctaaaattatgattgacgatcaagtaattgccagtcggatcagccaagatctattgtatgaacaagattcagcgtcagcaatggtcatcaagtctgcggttgaagatgcctataagcggtttattggaccggcaattgagcgtgaattacgcaagcaattaaaggaaaaagctgatcaacaagcgattagtgtctttggtgataacttgaagcatctcttgttgcaaccaccattgaagggcaaagttgtattaggctttgatcccgcttatcggactgggtgtaaattagccgttgtcgatggcactggaaaattcttggataagttagtcatttacccacacaaaccagcttcagctgacaaacgatcaaaagcggcggatgaattcactgctttactcgagaaatatcaagttgaaatgattgcaatcggtaatgggactgcgagtcgtgaatcagaagaattcgtaacgacgtgtttgaaatctatttcccgggaaattttctatgtgattgtcaatgaagcgggggcttctgtttattctgcgagtgatgcagcacgggcagaatttccagatttacacgttgaagaacgaagtgcgattagtattgcccgtcgtttgcaagatccgttagctgaattgatcaagattgatccacaagcagtgggggttggacaatatcaacacgatgtggcgcaaaaagagctcactgtgcaactcgatacagtgattgaggatgtcgtgaatagtgtgggagtcaacctgaatacggctagccctcagctgctacaacatatctcagggttgtcagcaactactgctcaaaacattgtgcaatatcgcaatgaaaacggcctttatcaaaagcggagtgctttgaagaaagtaccacgcttagggcctaaagcttatgaacaatcggtcggattcttgcggattattaatggggacaatccactcgataatactgatattcatccagaaagttatccaacggctaaagccattttgaaatcatttgggttaaccgttgctgctttaggaagcgatgcgttgaagacggcgattgcacaaatgcaagtaccggctctagcggctgaattagaggtcgggattgaaacaatcaccgacatcttaagtagtttgcaaaaaccagggcgtgatttacgggatcagatgacggcgccattgttacgtcatgatgtcttaaccttggcggatttgaaaccgaatatggcgttagaaggcacagtccgcaacgtgattgattttggggcctttgtcgatattggtgtgaaacacgatggcttagtgcacatttctcaactggcaaaccactttgttaaacatccttctgatgaagtggcagttggcgacgtcgttcaggtttgggtgatgagtgttgatcaagaacgtgaacgcgtacaactgacaatgaaagcgccaaaggcaaatgactgatcaagccttaactgaattgattgaacggttatcgttgcagttttttaatcggccgtttgtgcatcaagcaaatttcaatcggcgtttaaaaacaaccggcgggcgctatcatttacaggatcatcatatcgatatcaatccaaagatgttgaccgaacatgatacacagaccttagaaggggtgattaagcatgagctttgccattatcacctgcatctgttgcatcgcggttaccgtcatcgagacgcagagtttaaacaattacttgcacaagtcgggggtgcgcgctatgcaccagctgcacaaaagacagctaaatcgagcaaaattgtgatttataaatgttcagactgtgggcaagtctatccacgtcgccgtcgaatgaatacggctcgctatgtttgtcggcggtgtcatggacgactgatttatcaaaccacgcaaattcaatgaaaaaaggccacccctatgtttaggggtggcctttttttagttggcgcgtaaagtttgattctgagtggtgtagcccagcttctgatagagggccaacgcagccggattattccctaacacggttagttctaaataatcgagcgcttgtgtttgttgccattgctttgcggacgatagcagttgtgtagcgacgtggtggcggcgtgcctctggtgcaacatacagtgttgtgagataagcaaagcggtgtgcgataaacaagggtgagggacttgtttgggctgttgtaacgtgacaaaaggcatcgatttgcgcatcttggttttgatgaacaaagactgcttgtagtggatcagttatcatttgttgccagtcaaagaactcaggcgtgtaatcagcttggtaattagtgggttgtagcacatgcatttcagtcgttaattgttgatacagggtggttaatttggcaatatcggttagtttagcggggataatgggcatgtaatcgtctccaaagtaaaattttaattgacttcaatcatcgtttctcttatactaatgtacgtggcttaaagtgataaagcaagttacgcgggtgtggcggaatggcagacgcgcaagattaaggatcttgtcgggaattttcccggtggaagttcgagtcttctcacccgcatcataattcagttaggtaattccaattggaattacctttttttgtcccttgatgtaaatgattgaaactagggtgacaaatcgctataatgagcaataaattcagtttaggagtcagttaggatgacacataaaaattcatcagcttatacgattagtattatggcgattttaaccgcttttttaatcattcaaagttttattccgatggtcggttatattaatatcattcctgggctaccagccgtaacaacaattcatttaacggtcattattggggccgtgatcctgggcacacgccaaggggcgattctaggattaatttggggtttgatttcattatttagagcctatacctctccaggcgatccgctttcacttttaatctttcaaaatccaattatcgctattttaccgcggttgatggctgggatgattgctggctttacgttccaacacttatatcaaactaaaattcgtaaaaccggtgcaatggctttagctgggattttcggggctttaatcaataccattttagtgattggcttaacgcgtgtgctttacggacaccaagcggcagggatgtatcatactgatccgacccatttaatcatcgtgatgcttggcgttgttgcgttaaatgctgtaatggaagcaaccttagcagctgtggtgacaccactagtcgcaacaccactcatgcggtttaaacggacgcaataacaagtgcgggtagctacagccgacgattgtggtccgccacgggttgaataattaaagattgaaaaaaggagttggacaaacgtgactttgtccaactccttttttgtttattccagttgtttttgcactttcttagcatgcgcagcaactgtgttcatgttgaccttagcaatttcggcttgttgataaactgaactgtaatattgatttaaacgattgattggtgatttaagactgtcttcgtctgcatcagcatctgtatggtcgctgtaaaattcatcagatactttagtggccgcgttgtagaaggtggccaaggttgtataatcaagtgtcgaaatcttaagactttgatttaaatctttgacttgttcaatcggcaattcatcgttttcttgcttgaccagtttggtgaggcgtttaatgaccggtttgagcacagcttgttgttctttaagactttgaaaggctgcttcgcgcttggccgcagtcgtcgcaatcttagtatcttcaatcgttaatagattttcgtcgggatattttttttgaatcgtgagatagttatcaggaactggatcgccgattgtttcgagggttgaaagagctgttcgttgttgcttagtcgcatcttcaacggtttgcatatcggcttggagttgatgtttagtatccatcggtttttggcaagcggctaggctcaccccgatgaagataattggtaatagccgtttcaatagttttagcataagcaagcactccaatgagaaaaagttatactgctatcttaacgtaattaaagcaaaaagccaaattatttagggcatgattcaacatataaaataacacttgtctaaaaacacggatgctgattgtccgtgatagaaaacggtttatttttattgccaaatggttgccaatggttgttgcctgtgttacactatgtttgtactttttgaatggttgcggtacgaatgtttccaaaagaactttcttccatcggaccaccagaaatacacaaatttataatgtgtcatcgacacaaggaggatttttctcatggaaaacggaactgtaaaatggtttaacgcagaaaaaggttacggctttgtaactcgcgaagatggtagtgatgtattcgtacatttctcagctatccaaggtgaaggctacaagactcttgaagaaggtcaaagcgtttctttcgatatcgaagaaagcgaccgcggcccacaagctgttaacgtaaacaaaaactaatttaaaaattaacctaggggtcgcggcaaaagcaattttgtcgcgacccctttttttgattgggtggtgagctggagatgttaacgtatcaattgattgagggcgcagcacggcgacagtggctggatgatctattgttagcggatgaagaagtcggcatgattgaacgctatttgatgcatgggcaattttacaccgtaagcgatcagcagcaagtcatcggggtcttccatctgatggcactcaacaatcagcaggtagaacttaaaaatattgcggtacggccagaatggcagcatcgagaattcggtgggcaaatgatgactcaaattcagacgattgcaattgaccaagggtttcaatcattgctagttggcactggggacggcagtttggcagcaattggtttttatttgcgtcaaggctttcggttcgaacaaattcgcaaaaacttcttcgaccaatatcaaacgccaatctatgaaaatgggattcgcctaaaagatatggtggttctcgctaaaatactctaaaaaaacctgaccaaattggccaggttttttgaatggattaatcgagatcagtgcgtttttcaaatggatagacaaagccccattcagcacgtgcgtctgacatgatgtccatgacatcgcttgataattcgagggtatcgtttgattgatttccgcgcactgtttcttggaaatcatggagttcatagttcattgcgttggttgcgtcacccgcttgaatggtctcaacgcgaccatctgggaaagtgagggtggctttgtcaggccgtggataatcgtcaacggtgacatagccattttcataaacgagaacaccttgtttaggcatcttcgcatgaatgtttaaggtaacagtcaccatttcatgcttggcattatttaaaagtaatgttgattgctgatcaacaccggattctgatggcacccattgcgtcgctacaagttctggtttagcagttaacatccgacgtgcaaatgagagggcataaacaccaatatcaagcattgcaccgccggcaagtgcgggactgaagaagcgattgtttggatcaagctctttataacttccaaaagagacttgaattgattttaaagcgcctaagtgattagcgacttgttggcgttcaatctcagcaaacaatggcatgtgataaatggtcattgcttcagctaatatcaagtgcttttcgttagcaagagcctttgctgcattgagttcgcggcggttcatcgtaatcgctttttcacagaagacgtgtttaccggcttcaagactcgccataatgctttcgaagtgataattgtggggggttgcaatgtagacgatgtcgatgttgtcatcaccgagcatgtcggcataactaccgaatgcatgtggaatattgtattggtcggcaaaggcttgtgccttatcgagtgaacgagaagcagccccataaatgtgaccatcaggttggttaaaataagttgcgaaactattggcgatattgcctaagccgataattccccagttaagcgttgtcaataaaatcagtcctttactatcgtaatcggttacagccaatattatagcaataaaagcgctaaatagaaattaaaggggggttacaaattaaagattggtgttctgaatgaatttgtgtacaatatagaatagattcagataaagttgaggcagaggattggcaaaaaaacgtaaacgcaagacgacaaaacgcaaaccaacagctaactactactctaagaagagacgccacccaaccgattggctagtggtcgttttagtgagtctatttattctcggaattgggctcgttttattagttcggtataatggacaaaaggcccaagaagaacttgccgatcaagccagacaggaacaacaatcgcgccaagctaagaagcaagcgtttattaaaaaaatggtgccatatgcccaagaattacagacgaaatatcatgttttaccaagtattactttagcgcaagctattttagaaagtgattgggggaagagctcacttgctgcgcaataccataattatttcggcattaagggtgataatgaggccaacactaaggaaatgacgaccaaggaatatttaaatggtcagtgggtaacgacaacagcgcgttttagagtatataacaattatcaagaatcgatgcttgaccatgtacaattgtttgcttatgggacctcttggaatcggacgcagtatgcacacgtaatcgcggccactaattatgagcaagctgcccatgctttacaacaagacggctatgcgactgaccctgattatccagcgaagttaattgagctcgttaaggcttaccacctcgaccaatatgatcaataaagaatgctatgaaacaaatcatgggaaatctgctactaattaatctcaaaagagcctgccacaaatttcggtttgtgacaggctcttttccaatcgctgaataactggatttgagcttgttgtgttgctttttttgtggtaatctatttttaattcaatttcagaaaacattattagtcgttactactatcggtagtgatgtttaacgatgctacaaaggagagctcagcgtgcgactattagaggaacgcattaaaaaagatggtcaagtattaggtcaagacgtattgaaggtcgataacttcttaaatcaccaagtggatccagatttaatggctgcaatgggtgaagaattccaacgcttatttaaggataataagattactaaaatcctaacggttgaatcatctggcattgcgcccgctgttttcgcgggcttagcattccacgttcccattgtttttgcaagaaagcacaagagtttaacgttacaagataacatgtatagcgcaacggtttattcatatacgaagaaagtgaataaccacatttcaatttcgaagaagtttctgaatgcagacgatcgcgttttagtgattgatgatttcttagccaacgggcaagcggttgaaggcttactttctattattgaagaagccggcgcacaacttgaaggtgtcgggattgtcatcgaaaagactttccaaaaaggtcgcgaattgttagatcaacgcggcattcaagtggaatctttagcacgaattgcagcgtttgaagacggtcaagtcgtctttttagacgaaaataaataaatgttatttaacggagtgctgagaggcactctttttttgtctaaaaatttgttatcatggaggaaagtattaggcagacaacgcttaaattcgctataataagggtatacagtttggtgaacaggaaagcaggtaatatgatgccagttatttatccaggacaaaccatcggaattattggaaatgatcaacgggcctatatgttggcgctcaaagcaaaagaaatggggtattgggtagccgcgattgtgaccccgcagatgcaaaatacctcatttgcacgtttaattgatagtcagatcgatggtgaattcaatgattatcaaacattagtccaactcggtgaagtcagtcaagtgttgacctatacgaatgaattattagatgagacggtgctcgaacaactggcacaacattattatctacctcaaggcagtaatgtgttgtctgtgacgcaagatcggtacctcgaaaaagtctttttgagtgatttaaatatcaatattccgccctatgcgacagttgttgatgtagatgatattcaagatgcaatcgattcaatcggatatccatgtatcttaaaacccattcaaaaaggttacggtaagcagtatcaacgttttattcaacaaccgagtgaccttgaaaacattgaagctgcccttgagttggggacttatattttggaatcttggattcccgacgcacaagaactatcagtgatggtcgttaaaactgaagatggtaagtgtgtgacactgccagtcatcgaaaatgagtttgaagatcatcgcttgaaaatgtcgcttgtgccagcacggattaatcaagatgttgcgactgaaattaatcgattagcccacttaattggggaaaaattagactatacaggtgtttttggggttgaattctttttaacacccgctatgaatatttatgtgaaacgaattatgccaacaccgcacgcaacgggcgatgtcttgacacataccttgaatttctcgcaatatgaatatcatttgaaggccatctgtcagttggcagtcggcccatcacgcctcaataatgcggggatgaccttagggattcaagaagcacaacggtcattaattcaaacacagatgaagatcaaaccggattggtactttaatttgcacaacgtcacgaccaatcaacagattggatcggtcacagcaaccggacaagccatccaacccttaatcgataattacgaagcggcagacttatattagagtgcgacagcgggcggttatcttttgaggactagcataggccggcgaatgagcgacgcagtcgatcgttggacggacgtagctagccgcagaaagatgcccgatggagcacgtttcaaaacagagtgcatttgtggcggttatcttttgagcattaactggatttgacgagttggtgatgcaatcgcgaatttggcaaatttggttaagcacagaaagatgccacaaaaagcacgttttaccatcaccagcatttaggtagtatttggaggagaagtttatgttagaacgttatacacgtcccgaaatgggcgccatttggacaacggaaaatcggtatcaagcttggttggaagttgaaattctagctgtcgaagcgtgggcaaaattaggcgatattcccacagaggatgcgcagaaaattcgcgcgaatgctagctttgatttggcagaagtcaatcgcttagaagccatcacacaccatgatgtggtcgcattcacccgtgccgtttcagaatccttagcggatgaaaaaaagtgggtccactatggtctaacttcaacggacgttgttgatacagcacaagggtatattttgaaacaagcgaacgatttaatccgggctgatatcgccaattttatggccgttctaaaagataaagcttacgaataccaaaataccgtgatgattgggcggacgcatggcgtgcatgctgaaccaacgacgtttgggttaaaactagcaacctggtatgctgaaatgaaacgcaatcaagaccgttttgaacgcgcagcaaaaggcgttgaagccggtaaaatcagtggtgcagttgggactttcgccaatattccgcctgaaattgaagcctatgtgacagaacacttagggatccgggcccaagatatttcaacgcaagtgctcccacgagatctacatgctgattacattaacacgatggcggtcgtggcgacctcaatcgaacattttgcgactgaaatccggcatttacaacgaacagaagtccgcgaagtggaagaattctttgctaaaggtcaaaaaggctcatcagcgatgccgcataaacgcaatccaattagttctgaaaacgttagtggcttagcccgtgtgattcgcggtcatgtgattaccgggatggaagatgtgtcattatggcacgaacgcgatatctcacatagctcagctgaacggattattttacccgatactacgattttattggactacatcttgaatcgcttcacgcggattgtgaagacgttgacggtcttccctgaaaagatgaaggctgacatgaacatcacccatggtttaatttacagccaacgtgtcttgttgaagttagtggatgcgggtctgagccgtgaagcagcctatgatttggtccaaccgaagacagccttagcatgggatgaacaaaaagatttccgccaattattagaagccgatccgaaagtgacgagtgaactttcaaaagccgatttagacgacgcctttgattaccaatggcacttaaaacaagttcaaacaatttttgatcgggtatttgcataagcatccgacattaaaagccaccgtatgcactaggccctgtcaagttgacaaatgaaataatataaagttgaatctgtctctatgcggcttcactccagtattcatctggggtgaggccgtttctttgtgctgagcggttgtggtgattgaaatattcgattccttcctcaaccagtcttacaagctcttcgcaagtctttgctagtggatggcgagccatccaccgtaacttgaattcgttccaccagcgctccatcggtgcgttgtcgtatggtgttcctggtcgagacatactacgtgtgacgttgtaacgaccaagaaagttgttgaaggcaccagaggtgtaggctgatcctcgatcagtgtgaaccaatgggtggacgtcgccagaagcctcaaaggctcgttggaaaacctcgatttctgctgctgacgtttcagtagtgctcaaattgtaggacaataaacgtcggccgtagagatcaaggacgccactcaagcgcaccttatacttattatttacgccgtaagtcagttccgttgaatcggacaaccagacctgattaggactgtcgacgtcgaagttctgattgagcacattgtcttgaatgtgctgttcgttctccttatgtcgactgtgcttcttgacccgaatttgacatgtcaagctgagctcccgcatcacacgacgtaccatcctgaaagtaacggggaagtcaattaggtcatcatgttgaagattcaataaaaggttcccagcaccgataccttgatgatgaaaatcaaaccagtattgtgtccgttccttgagctgacgattacgggcttcccaagctgtttcttctcgatttaaccctttgtagtaagcctgccggcttacaccgacaacggccaacagcgtagatattgcaccacgcttgccttgactgacctcattaattgcgaagtaagacagtcgatgttgtttactcaccccctgcgctggatttccagcaatttttttgcgaatgcctccacaagctctttgtctgcgagctgtgctttgagctgcctgatttcaagattggctttatcgagttcagtcagctcagcttgttctttgtgatggccacggttgtccacgagcgcctcatagccgccgtgattggccttgattacccatgaacgtgcttgttgataagagacttggaagcgttcagcggcctctgtgtatgaatgattcagcttggtgacatactcgacaatttcaatgcgttcttccaaggttgttttacggctcatagtgggaacctgctttctggacggcgacgccgtcaaaggtttattcccattatacttgtttacccagtctacgacttgctgcgatccacgaagtccaaacttatttgcaagttcatcaaaggtgccttcgcctataagatatgcgtggactactttgagcttgagtttcttcgaatagtgtttgtttttcttagcctcctttagaccattaattccatcacgggagtatcgatctcgccaacgctctagcgtcttatgattaatgccatggcgattggccaccggacccagtccaatttttgattgggtcagttcatctaagattgttaatttctcgagtaccgtatgtttagatctgggcatacaaaaatccctccatagtcgtcagatgaattattgtatttcatctgacaaccataaagggattatcgcagtagcctaaaagttaggttaaggtggctttttttatggcaaaataaattctgattcgaaacgacaaacttggtgatggttactgagggcgacttcaaacgctttttgccctagggtgaagaagtgatggtcaattgttggcagttgcaataaaaaactggataattgtttttcttgaccaattaaaagcggggtcggcagttgatgattcagatgatattggcggacaccagcggcaatgtcgtcgccatttgtaaaatagcaagcgagggttggctgtttttcaaccagttgttcagcggcacgatagccatcttcaaatgaacgcatgccaccgaccattaactcggaatcaggttggcagttgaaaacttgttgataagcgttcgtgacggcaatccaggtcgggctttgcgctaaattacgacttaatagtagaccaatttgctgtgctttgtgggctttaaggtacttgaatgccgctaaataggcgggctcacggtgagaataaacggccgagatatgatgggtccccgggtcttcacaacagacaatttgaccataacgcgtgtactctgctaagactgagagtgcaataccatgtgaagtaaaaatgagtgcggtaaaattcttacgttttaattgttcgagataatctagttcgactgcttgattatattcggaaggtaggagcacaacgtgatagccgcttgaaaacgcagcatccataatcccgtttaagagttggttgaaatacggatggtcattgtgcggtaggacgaccccaatatttttattttgaccgaagcttaaatcgcgcgctaagctattaggcacgtaatcgagttgtttaatgaccgcttcgattgccgttttggcaggttcagagacgtatttttgatgatttaacacacgggagacggtcgaaaccgaatagccgcttttgcgggcaatatcacgaattgttggcataatcctaacctactttttgattaactttagtaatgtatttctttagaccatagctgaagccactgtgatgattagtcttcgtaatgaattgacccgccatctggatttgatcactggcattgcccatgacgatggggtggccaactagcgataacatggctaagtcgttttgaccttcaccaaacgcggcgcaatcagcgactgttagtccagtgttttctaagatggtggttaatgcgttagctttagtggcttcatgactcgtaatttctaaggtcattgtacctgattgttgtactgaaagaccaggcaagtggcattggttgatgaaatcagcaacagttgcccgttgttgtgtcgtttgcataatcagttgaattttgaaaagcttgagaaatggattttgcaattgatcactaaaattgatgagcgtcggcaattgaccggtttgcttagcgattgcctcaataccagcgtcaattgtctgcgtgtaccagtggtgtaagtcatacgcacttaaactgatgtcactaaattcagattgtaatgcggcaattaatgttgcgacagtagaggttgcaagtggatattctgctaaaaccattgggaaaagatctgtcggttgataaattaaccccccgttaaaagcgacttggggtgtcgttaacgctaactgatcaatcgtagcttgcatttcttgtggtgaacgcgcagaaatcaaggaaattgggattgggcttgctttgacagccgcaatatctttttcagaaagctgtccgtcttggtttaacaatgtaccgtctaagttagaaaaaatatttaatcatgatgcataccacctttcttggattaaggtgagtataatttatgaaacgcgtcccaggtcaaggcagaagattgcgaaaaattagaatccgttttactagatcgtgttcgcttttttctacctatctagtttggtataatataggctgattgcatttacggaaggatgactaatttgtctgaaaaagaattgttacaagggatgaacgataagcaagctgaagcggtcctcacaacagaaggcccacttttaatcatggcgggtgctggtagtgggaagacccgggtgttaacgcatcgggtcgcttatttaattgaagaaaagcacgttttaccatggcgcgtgctggcgattacgtttacgaataaagcggcgcgtgaaatgcgtgaacgggtcggtaacttactcggcgaaggggctcaagatgtttgggtatctaccttccatgccctttgtgtgcggattttacgtcgggagattgaacaaattggctacaatcgcgcgtttacaatcgcggatccttctgaacaattgacgttaatgcgccatgtttgtcgggatttaaacatcgacacgaagaagtttgaaccaaaggcgattttaggcacgattagtaacgccaaaaatgaactccaaacaccaagcgactatgcgggtctagcaaacggaccattcgaaaaaattgtggcccaatgctacaccgaatatcaaaaacgactccaacaaaatcaagcgctcgatttcgatgatttaatcatgcaaacgatccgcttatttaaagaaaacaaaccaacgcttgaacactatcaagaaaaattccaatacatccacgttgatgaataccaagataccaatgaagcgcaatacacattggttaacatgttagctgataaatacaagaatctctgtgttgttggggatgccgatcagagtatttatggttggcggggcgctaacatggacaacatcatgaacttcgaacatgattatccagatgctaaatcagtgatgttggaacaaaattaccgttcaaccaaaacgattctagaagcagccaacggtgtgattaacaataatcaatatcgtaaacctaaggaattgtggactgaaaataacgaaggacaaccaattacttattatcggggtcaaagtgaacgtgacgaagcactctttgtcattacgaagatccaagaagaaatgcaaaagaaccaacgtaaattcggcgactttgccgttttataccggacaaatgcccaatcacggtcaattgaagaagcgtttgtcaaagccaacatgccatacaagatggtcggcgggcataagttctacgatcgtaaagaaatcaaggatatcttggcttacttacgcctagtcgtgaatgcgtctgattcaatgagttttgaacgggttgttaacagtccgaaacggggaattggccccggcactctcgaaaaattaacgcaattcgcggatgatcatcaatggtcattacttgaagcagcgcaaaatgcggaactctcaaccattccaggtaagagtcgcaagacgttgatcgattttggcaacgtcattggtgacttagcgaagatgcgcgaatttttaaacgtgacggaattaacggaacaattattggataagactggctacaaaaaagcgctcgaagttgaaaacaccctcgaagcgcaaagtcgtttagaaaatattgaagaattactctcagttaccaaacaattcgacgaacattatgaaccagaagaagatgacagtgatttatttgtggacttcttggccgaattatcattggtctctgatttagattcagtcgaagaagaagccggtgaagtgaccatgatgaccttgcatgctgccaaagggcttgaatttccagtcgttttcttgatggggatggaagaaggcatcttcccactatcacgtgctttattagaagaagacgaactagaagaagaacgccgtttggcatatgttgggattacccgtgctgaaagcaaattgtacttaaccaacgcttattcacggatgttatacggccgtcaacaaagtaaccaagcgtcccgatttgtcggcgaaatcgatgataaattattggattacgcaaatggcaatgctggcagtattccagaacgcaatgtgccatttggtaagagcaatcgttatgcacgcgcaacggctacaacgtataatgcaaataaaacaacgacgagtcacaagattgccgacacaactggcggcgataacagcggtgcttggacagccggccaaaaagtccaacacaagaagtggggcattggcacagttgtcaaggtcaacgggaccggcaatgaccaagaactagatatcgccttcaaagaacaaggcgttaaaagactactagcaagcttcgcaccaattgaaaaagtagaatagagtgcgtttccgacggttatcttctgaggattagcacaactcggcgaataactgctgcaagcagttgtttgacgagtagcgctaaccggaagaagatgtcggaaaaagcacgtttaagaaaaaagagtgcgacgacaggcgcttatattttgagcattaactggatttgacgaattggcgatgtaatcgccgatttggcaaatttggttaagtgcagaaatatgcctggcggagcacgtttaagaatcagagtgcgtttggttgcggtcagcaactgagcattaataaaaaattgcgaataatcttggttttaggattatttgaaattttagattaagcggaagttgttgcaaccaaaaagcacgtttcaaaacagagtgtgtttaaagcggatttgactctgagcattagcacagtgttgtgaatgaccgacaaagtcggtcgtttgcaatacgaagctaagcacaagagtcagctttaaaaagcacgtttcaaatcataaacagtgaggagtcttcattatgggattagctaaaccaatcgatcaatatacgcaaactgaagcggcagcggcggcccaagaactccgccagacattagctgaatacagcgaagcctattacaccaaagatgccccagttgtcgaagatcacgtgtacgatgaattgtatcgcgacttagaaacgttagaagcggcctttccaatcattgttactaatgactcgcccactcaaaaagtcggtgatcaagttctgcctggctttaagaaagtgacgcatgaagtaccgatgttatcaatgggcgatgttttttctgaggaagaactcgcgacttttgataatcgacttcaaaaaaacgttgagcatgccatcgaatataatgtcgaattaaaaattgatggactcgcgattgacttgatctatgaaaaagggcaatttgtccgtggtgcgacgcgaggcaatgggacgattggggaggacattacccagaatcttaagaccatcaaggcgattccgcaaacattaaccaagccagtctctattgaggtccgtggtgaatgttacatgcccaaagcctcttttgcggcattaaatgaaaaacgggaagcagaaggccaaccgccatttgcaaacccgcggaatgcggctgctggtagtttacggcaattagatgccaaaatagcggctgagcggaatttgagtgcctttatgtacacgattgtcacctttgacgatgtgcaagcgacaacccagtacgaagcgcttgaagtgcttgcagaactcggctttaaggtcaatccaaccgctgaagtttgtcataatatgacagaggtaaagacctttatcgagcgctatcaagcaacgcgggatgacttagaatacggcatcgatggggttgtgttaaaagttaacgacttagctttacaacgccaactcggtaatacggttaaagtgccacggtgggagattgcttataaattcccgcctgaagaagcggcaaccattgttcgtgacatcgaatggacaattggtcggacaggggttgtcacgccaaccgctgtgatggatcctgtccagttggctggtacaacagtcgcgcgcgcctcattgcataacgctgatatgttacgtgataaagatgtccgtttgttggacacggttttattacacaaagcaggcgacatcattccagaaatttcacaagtagtactggctaaacggccggctgacagtcaaccgtatgtgattccgacagaatgtccttcgtgtggtcatgaattggttcatttggatgaagaagttgcattgcggtgtattaacccaatgtgtccggcacaagtgaaggaacagttaacgcattttgcttccagaaatgcgatgaatattgacggcttaggtccacggattattgcccaattattggatcaaggattggtccatgatgttgccgatttataccgcttaacggccgatcaacttgcgcaactggataagtttaaagaaaaatctattaataatttgttaaatgcaattgaagctagtcgccagaattcgctagaaaggttattatttggattagggattcgccatgttggtgccaaagcagcccgtttattagcggaacatttcttgacgatggaggctttgatggccagtgatcaagaagaaattatgtcggttgatacgattggcgagacgattgcggatagcttagcgacttattttgctgatgatcaagtacaaactttaattcgtgaattggctgaagtgcaagtcaacctgacctatactggggtgacaaaggcacaagctgaaaatagtgatagttactttaacggaaaaacggttgtcttgaccggtaaactatcgcaatatacccgcggtgagttgaaacaacaacttgaagataacggcgctaaagtgaccggctcagtttcgaaaaaaacagatattttgattgctggagaagatgccggcagtaaattaaccaaggcgcaagcattggagattccaattatcaacgaagcagacctagatagttatttggcgcaataagcgaatcaattaggacttataaggaggccattttcagtggcaaagtataaattatgggtagttgcagccgcaacggttttattgttggcaggttgtacaagtttacaaagcaattcgagttcgtcatcatcaactaagtcgactaaaaagctacaaacgaccgggaaagtgactgacagcatgtatgaaggggttattgataataaccaatacaagacaagtcagacacgtggattaaccacacaacaaagtaacacggcatttgatgtgaagagtttggaaagtggcttattaaacatttctaaaaaacaattccctactgataaatacctctaccaagaaggtcaaaccatcaaaacggcggaagcgcaaaaatggttggcacgtcaatcaaaagataatacacttggcttgaatccagaagataatggtgaaaaagaaccggataagcggaatccactgtatctccaacaaatcttagaacaagacttcttaggggcagatggggcgcttgaagggatgagtattggtcttgggatgaatcaagtggattactataccaaggaacaatatggtgctacttttgaaaccaaaatttctagtgccatgatggcgcaacaaggtaaacaaatggccaataaggtcttaacgcgtttacggcagaaaaaaggtttgagtaagacaaccatcgtggtggggctttacaaacaagcacctaaggatagtttagtgggcggaaccttcttcgcttatggggtcagcaaaaacggtagtacaacgattgattcatggcacaaaatgaaccaagccaaccaagttttcccactcgttaatggtgaaaaagcggtcaatcaaagtgatgcggacgcgtttactagttttaaagaacaagtccaaaccttcttcccgaacttgagtggtgtcacggctcaagcacactatgaagatggtgtattggctgggatgaacatcaccgttaatacacaattctacagtgaaacagaaatcatgagtttcacacaatacattgcaaccgctgctgataaatatttaccacaaaatattccattagatatttcaatctcgtctgcagaggggatgcaagcttacgtaggccgagcagccggcagtaaagggttctcaacccacgtattcgggagttattaattaaagagtgcgacaacagtcagttatgactgataggcaaaaaaatagcgtcgacaactaacgcagttgtcgacgctatttttttggacctttaaaagtcagtggttgtaattttaaaaataacagtgtacaatatgcgatgttgttgttattttatttattacaccaaaggagagcatcatgaacgagtttaaaacagcacggaattggctagacaatgcggatgccgtcattattagtgctggtaatgggctatcaattacggaaggttacaatatttttgcacacgacgaagcgcttatgacccactttgggactttttatgaacgctacgggattatgaatattcttcaaggggctttttacaactatccaacagtggctgaaagagatgcattttacaaagtattgttcgattatatggttgatcactatgaaagtacacctgtctttcgcgatttaaagcagttggtgggcggtcatgaatactttgttgtcacatcaaatggcaacatgcattttcaactgagtggatttgacgaagaacggatttttgaagtggaaggtaattttggtaacaatcaaaatccaatgccgatgattcaaaagcaacaagctaagtttaacgcatttgttcaaaagtatcgttcacaaaacgtggtgattctggaattaggaattggtgctaataatcagttaattaaggcgctcctcatgcaattggtggcgcaaagtctaagttaccgttacatcacgttgaatttaccgcacgaaatcaatattcccgcagccattgaacaacggtcaatcggtcttgctggatcaatcgatgatcattttaaggagctcctcaaaaatgactaatttagactatcaagcaacactacaaaaaatggcaacgacgctcaaagaggcagattacgtcatcgtgggagccgcagccggcatgtcggctgcggctggtcccgattggtacaatcccggcgatccaacctatctcgagaaattcaaggcaattgaagataagtatcatgcggggagtatttggcgtaatggctatctcgaacaatacactggaaaaaatgggaaaatcgcggcgatttatggggctttaagctgtctttaattcattttgttttacatgaatcggtttaccaaccgtatcaggatttgaaagccattttaaaggataaagactgtgatttgataacgacgaatcaagacgtgcaattctcgaaagcttttccagataaagatgtcgccacgattcagggtgactggtcctattttcaatgtgccgataaatgtcatgattaagtctatcctaatcagacagttgttgatcaattatttccgcaaattgaaaatggccatttacccgaaaacttaattccgcagtgccctaaatgtggtgctgaaatgttggaatgggtccgtggttatgaattccttgaaggacaacactacaacaagcaatacgcaaagtatcgtcaatttattcaaaaagctgaaggtaaaaaaacggtctacttagaactaggtgtgggtatgatgacaccgatgtttattaaggaaccgtttatgaatctgacgtaccaaaatccacaagcaacatatatcaccgttaatcccaaagatgcgattgtgccacgtgaattaatggaccgcggtattgcagttaagtatgacttagtaaaggtactagcaaatctaaaagagtgcggcatcagccggatatccgctgaggattaacacagaatggtgaataaccgggttagcgattgtttgccattcagggttaaccggaagcggttggctgatagagcacgtctaaaagaaaagagtgcggcttcagccggatatccgctgaggattaacacagaatggtgaataaccgggttagcgattgtttgccattcagggttaaccggaagcggttggctgatagagcacgtttaaaagaaaagagtgcggcatcagccgggtatccgctgaggattaacacacaaaaaggttgggcaatttgcccaacctttttgtgttagttttcgtaaagttttaattctggattttcagcgagacgttgttgatattgttcgataatgtcggctagtttgatggcttgcatttgctgttcagcagtttcttggatttgatcgtaataggtagcaagcgataattgaatattttgtccggggccgcaactaggatcaatttgggtatcgatgttcaataaccgggtatcatcgacggctttatagatatcacagagcgaaatttggtcaggagctttcgttagtttgggttcggcatggcccttaacgctcgtcaataggccagctgtcttaagttgtcccatgatttggcgaataaaagaggggttagtattgatgcttttagcaatgcgctgactagaaaggttatcaaacgggtttaaagcaatcagggtcatcaggtggacggcattgcttaaacggactgattttttcatgatagactccttttaaaaagatgttattaagagtataacacctattgaggtgttctgctgtaatcaggctagccagagtctgccgtaaatgaaaattacatgaaaggagttcagactggataccgataatacagcccgataatcaattaagttgcttctatcagtaggtttgggttcttttatgagcatgaaataagttgtgaaatgtctattaaaattagacttatttttgaaaaatcattaagcaataaaaaaattcacccaaaattttgggtgaacgcatcaaactttaatgaaattattttagcagtggagtggttataaacgtttaaaataggaaaaaaacaattctaaatagtttagtaacttctagtatgggtaaatccgtaagttacaccgacagactattgagtgttgcttttgaaactactcaaaactggggacgcttggttacgatacttgccgcttagctaatactgagtgttatttgttaagttggaaagccttagtgattaagtcttccaatgatgacatgatttgattgctagcccaatctgttgtgagttgtttgaaagcaactgctttttgatcgatgtcatgtttcttaggcattggtttgaagttttcggctggttggtcttcttcaactgctgtttcttcaaattgttcaggtgctacttccggtgcggctactgtttcgtcttgaacttctgcgggggcagttgtgcttcgtgagccatctgctgattcccagtagtgagttgtttgaccgccaattgtttcggtaacttctacaggttcgctgtcatcgatttctgtttgtaaccatgcttcttctaaagcggcttgttctgcggctgcttctttggctttagcggccattccaggtgttacaccagtgatagttacaccaaccgaagtggtcgttgctgaaacggtcgtactttgtaagacaatgccacccattaaacttaaaactgctactgctacaaggtgttccgagatattgattttcatattataacactcatctataagttaatgataatcttgtacattattcacaacttcttatctgtactcagtatataagattaaacgaatgcttatctattataaactcttataaatcatatcgccttctaatgaattgcataacattcaattacgcttttaaaaagaaagtaaaaatatatttcaatatctgctgaaaccggtaaagattaggaaaaactggtaaatttcaagggatgtcactttcttatacgttaatatatggtaaaattaatcagaatggataaaagtgacagaattagaagaggggtttactcatgattgataaaacacaagttcagcatgtcgcagaactttcaaaactagcttttagcgatgctgagttagaacaatttactgaacaacttgcagacatcatgaaaatgactgatgaattaaataaagttgatacaacgggtgtcccagtgacgacccacgtgaataaccttcaaaatattgtccgcgaagatgtggctcaagctggcacagatcgcgagattttaatgaagaatgcaccagattcagcggacggcttattgaaagtccctgccattatggataaggaggaagactagccgtgaactacttatatgaagatttacaaagtatccatgccaaattagtggctggtgacttaactgctagccaattggtaactgaaacagttgctgaaattgacaagagagaaccacaagttgatgcttttttagtaatcgatgaagctggtgcacaagctgcggctgccaaagtggacgcccaaccaattgatgcagataacttattagctgggatgccaattgggattaaagataacttattaacagatggcttaacaactactgctgccagcaagatgcttgaaaatttcacgccggtttttgatgcaacggttgttgaaaaattaaaagctaaagatgcaattgtgatcggtaaaaacaacatggatgaattcgcaatgggttcatcaacagaaacatcagccttcaagaagacaaagaacccttggaacttagacaaagtacctggtggttcatcaggtggttctgcagcagcagttgcggccggtgaagtcgttgcttctttagggacagatacgggtggctcaattcgccaaccagctgcatttaatgggattgtcggcatcaaaccaacatacggccgtgtgtcacgctggggtgcgatcgcttttgcttcaagtcttgatcaagttggggtctttagtcggacagttgctgataatgcgactgttttacaagccatcagtggtcatgatgaaaaagatagtacgagtgctgatatcccagtgcctgatttccgtgccgctttaaatggtgacatcaaaggtatgaagattgctgttgccaaagaatacatggcagaaggtgtcgaaccaggcgttaaagcccaaatcgaaacagccattgaaactttgaaatcattaggggcaaccgttgacgaagtcagcttgccaaattctaagtatgccgtccaaacttactacattatggcttcaagtgaagcttcatctaacttgtcacgttttgacgggattcgttatggttatcgttcacctgaagccaagacacttgaagatgtgtatgttaaatcacgttctgaaggtttcggtgatgaagtgaaacggcggattatgttagggacgtttgccctttcatcaggcttttacgatgcttacttcaagaaggctggtcaagtgcggacattaatcgtgcgcgactttgaaaaagttttcgcagactacgacttagtggttggaccaacaacaccaaccaccgcttttgacttgggtcgcaaagtatcagatccagtgacaatgtatatgaacgatatcttaacaattcctgctaacatggctggcttaccagcaatgtcagtgcctgccggcttagtagatggcatgccagttggtttacaaattattgggaaagcatttgatgaagaatctgtttatcgcgcaggttatgcctttgaacaagcaactcaatttaacaagaacgttccaagcttcaaaggaggaaaagcctaatgaatttcgaaacaacaatcggacttgaagtgcatattgaattaaaaaccaattcaaaaatgtacagtccatctcctgtaaactatggtgcagaaccgaatactaacacgaatgtgattgactggggttatcctgggacattgccaaccttgaataaaggggcatacacacttgggatgatggttgcgactgccttgcacgctgatattgcgcgcgatacgcatttcgaccggaagaattacttctatccagataatccaaaagcttaccaaatcacacaatacgaacaaccccttggtaaagatggctatatcgaagtcgaagtcgatggccatacaaagcaaatcgggattgctgaattgcacgttgaagaagatgccgggaagaatacccatggttcagacggctattcatatgtcgatttaaaccgtcaagggactgccttgattgaaattgtttcaaaacctgatatgtcaacgcctgaagaagcctatgcttaccttgaaacgttacgccaaattgttcaatttactggcgcatctgacgttaagatggaagaaggttcaatgcgggtagatactaacatttctgtgcgaccaatcggtgcgaagcaatatggtgtgaaatcagaattgaagaacttgaactcctttaatcacgtccgtttggggttagcttatgaaatcaagcgtcaatcacaacttttgattgctggcgaaacagtgcgtcctgaaacccgtcgttttgacgaaaaaacgggcgaaacattcctcatgcgggttaagaccggtgcggatgactatcgttatttcccagaaccagatctaccaccattacacattggtgatgattggttacaagaagttcaagacaatatgcctgaaatgccggctaaacggcgtgcacgctatgtggatgaattgggcttgcctgaatacgatgcgggtgtcttgacgaacaccaaggaaatgtctgacttctttgaagcagctgttgctgatggcgccgcaccaaaacaagtttctaactggttgatgggtgaagtgaatgcttacttgaacgacaaacaaattgaccttcaagaaacagccctcacacctgcccacttagcccaaatgatcaatttaattaaagacgggattatttcatcgaagattgctaagaaagtcttccaagaaattatccaaaatgacacggatccaaaagcctgggttgaagctaaaggcatggtccaattatcagaccctgctaagttgacaccaatcatcacaggtattttagatgacaaccaacaatcaattgatgatttcaagaacggtaaagaccgcgcagttgggttcttagtcggtaagattatgaaggaaacacggggtcaagctaatccgaaagttgtcaatgacttgttgatggccgaattgaacaaacgataattgatattttaggagattcgaatgcaaaaacgtgcacggttaatttataatccaacttcaggacatgaagtgatgaaacgtagtgtcgctgatattctggatattttggaacaagcgggttatgaagcgagtgcttttcaaacaacgcctgaagaagcttcagcgcaaaaagaggccacaagagcagcaaaggcggacttcgatttaatcgttgccgctggcggtgatgggacaattaatgaagtcgtcaacggcattgccggcttggaaaaacgcccaatgatggccgtcattccggctgggacaacaaacgattatgctcgggctttgaagattccgcgtgataatccggttgaagcagcccgcgtgattttgaagaaccaaacgcttaagatggatatcggtcaagccaatgacaattacttcatgaacattgctggtggtggtttgctaaccgaattgacctatgaagtcccctcagactttaagtcaatttttggctatctcgcgtatgtcgtaaaaggtgctgagatgttaccccaaattaaaccgattaagatgcatctggaatatgatgaaggtacgtatgatggggaagcttccctattcttactcggtttaaccaattcagttggtggatttgaacagattgcgccggatgcacaactgaatgatggtaatttctcattgattgtggttaagacagccaacatggccgaattagtccatttaatcgcactcgtcattaaaggtggcaaacacgttaatgatccacgggtcatttataccaagacgtcaaaactagttgcgcgtcctggtgatgatgacgttaagatgatgattaatttagatggcgaatacggtggcgatgcaccaatgacctttactaacttgcaacaacatatcgagatgtatgtgaataaggaagatattccagatcacgctattacatcagaaacctctactcagcagtctgccgaagatttattcgtaaaggaagtcgaagcaatttctgaagaagacatagacggcgatggtaaaataggttaaactggaacattggataacgtgagcggattgaccgcacacttgtagataagaaaagagtccgaagcaaaactcagttttgtctcagactctttttacacaattaaaaagaggtaactatgaaaatacaagcacctgtaagaaaaaatgaaacattgacggttgatattatggatttaacctatgaaggcatgggtgtcgctaaagtcgacaactatccgttgtttatcgaaggcgttttgcccgatgaacaagcagaaatccaagtcacaaaggtcaataaacaatatggttttgcgcgcttagttaatttattgaagaaaagcccagaccgcgttgaatcaaaagctaacatttactcacaaactgggattgcgccattacaacacttggcatacccagcccaattagatttcaagcgtaaccaagtcttgaacgtcttccaaaaagcccatttagatattccagtgcaacctgttttagggatggatgatccaacaggttaccggaacaaggcgcaagttcctgttcggtttatcgatggtgctttaacaactggtttctaccggaaacacagtcatcaagtgatgccaatggaagacttctacattcaagatcctaagattgatgaagctatcaaggtcattcgtgatatcttgcgtcgtttctacattgatccatacaacgaagatacgcataagggtgttttgaagaccattatggttcgccgcggttattacagccacgaaatgatgattgtcttcatcacgcggagtaagaaattaccggctgcccgtgaaatcgccgttgaaatcaaaaaagctttaccagaagtggtcagcatcatgcaaaacgtcaatgctgctcaaacgaacgtcatctttggtgacgaaacaaaattaatcgctggtcgcgactttattcgtgatgaattaatgggcttgaagttcgaaatttcagcccaatcattctaccaagtgaacccagtgcaaacggaagtcttgtataataaggcaatcgaagctgctgaattaacggggaacgaaacagtcattgatgcttattcagggattgggacgatttcattagcagtcgctaaacatgctaagcaagtttacggtgttgaagttgttgaatcagctgttatggatgcgcggcacaatgccaagattaacggcatcgaaaacgttgaatttacactcggtaaagccgaagaagtgatggcgcaatggcaagcagatgacttaaaagtcgatgctttgattgttgacccaccacgtaaagggttggaacctagcttcattgaagccgttggtcaattaaaaccagccaagatggtctatgtcagctgtaatccagcaacattggcgcgtgatttagaactattggcagcccaaggctaccaagcagaaagcacacaaccagtcgacatgttcccacaaacgctacacgtcgaaagtgtcactaaattagtattaaaataaagtgcgtttgtggcggttaacttctgagtatagcctaggctggcgaataaccaacaagttggtgatttgacagacgtagctagacggaagaagttgccacaaaaagcacgtttcaaaataaagtgcgtttgtggcggttaacttctgagtatagcctaggctggcgaataaccaacaagttggtgatttgacagacgtagctagacggaagaagttgccacaaaaagcacgtttcaaaatagagtgcgtttgtggcggttaacttctgagtatagcctaggctggcgaataaccaacaagttggtgatttgacagatgtagctaaccggaagaagatggtttatggcgcacgttttagcgggtcgttattatccagagatggaaagtagcgacccgttttttgcgttcagacgtgcatttaagcggaaggtcggctagaatgaaattatcaaaacatgtttagagggttaacgcatgaatgtcaaaaaacaatctataatgatgcgcttagcgcaacattttaaccgattccaatccgcggcggtctatcagattatgcagcgaagtttaacgttgttatttccatttgtcttgattgggagtatcagccaactcatccagctagcactttttaaccggaatagttttgttgtgaatgtatttcatctttcgaattggttgagtaaacggaatatctttcagatgatgtttgacagcattacgagtttgacgttaggaatcgttgcggcattagcagcgatgtgtgcggcgcgctatacagccaagcactataagcgtgatgaacaattagccagcattacggggcttattgcctatttaatcttagcgttacggttgacgccaaatgagggcttatctttcaacagccagatgttgggaatggggggcttattttttggcctattagtcggctatctgactggattagccttcaaaaaattaggacgacctcatcggcgcgatttaccgttgaatgggtcagcggtaggacgttcattggattctatgtgggcgattttattggtgctcggcgtcattttagggctgagtgtcctgctaaattggttggcgatttcaatcttgccagatcaagtcatcttacgattacaatcactaaaagcaaatcaaacgggtctgcttttcacgttggggactggtttagcggccactagcttaactttttttggattaacgagtatgccaacattggcccaatttgggcgtgagggaatcgcatcttcggccaacttaaactatgcgtttagtcatcacacggcttggcacgttccatatccgttcacgttagggactttgtatgaaccctttggtgcgattggcgggacgggtgggacattagccttagtgattgccgttttcatcttcagcaaacaaagggattatcatttgattggtcgatggtcgttgttgcccgttttatttaactttaatagcgcggtccttgtgggaatgcctgtcattggaaatggcttgtatgtgattccattcttattggtaccactggtaaatatggggattgcatcggcagcagttgcattgaatctcatgccgtcggtagtcttcacggttccacttgggacccccggcttattgcaagcgttcatgggcaccaacggtgatttagtcgcgctggcggtgacggtattaaacgttgtcgtcggcgtgatgatctacaagccgtttgtccaattggcagatcaattagcacttgtaaaggaggcggcataaattggccaaattaagaaaaaaaagcctctggttgttagtcattagtttggccttgatcggcggattaatgtggccagctgctcaatggagtcgccagagcgttatgaccttagctaagcgccatgattcacgaatgtcaccggtaatttttattccagggagtagtgcaacccaaaatcggtttgatgaattagtggctaaattgaacgctaaccgcgggaatcggcacagcttgttaaaactaactgtgcatgaaaataatcagattagctattcaggggaaattaaaccgcgggataatgaaccgtttatcgtggttggttttgaaaataataaggacggttacagtaatattcaaaagcaagctaaatggttttcgctggcgtttaccgcgttgactaagaagtatcaatttaataactttaaagcggttggccattccaatggtggcttaatttatacagcttttttagaagattattttaatcgcgatgatattacagtgaagaagttgatgacgattggttcgccgtataacttttccgaaacgtcgattacgcataagtcacagatgctgacggatttcattaagaaacgtaaaaatattccgacgaacttatcgatgtattcaattgcgggaacggaaaactttgaaaatgatgggattgtacccgcgcgtagtgtagaggcgggaaagtacatttatcaaggacaagtcaagcactacaccgaaattacagtgacaggtgaccaagcgcaacactctgatctaccacagaatcaacagattgtggccttgttagaacaatacattctcagcaaaaagaacacccgcaatacacaaccaacacctaaggattcaacaccttcagaagaccaataaaaaaagccccagaatagcagtaaggttgttattctggggccttttttattggcattcattaattagaatgcttggtactttctttttgaaccagagcaccaattgctggcaaattacccaagctatcgattgacttatttggcaagacaatggtgttattttgaccgtctgcgatgtgttccattgcttcaatattcttatattgaagatagagttcgccgttattgactaagctggcattgatcaaattaatttgatctttaacagcttcggcaattgttcgttcactttgagctttcccttcagcttccaaaatttgtgtttgtttattggcttcggcttctagaatattcgcttcttttaacccttcagctttacggattgcggcggctttgagcccttcggcttccataatgttggcttctttttcacgcgaagcacggagcaatttattcattgattcttggatatcgtgggccacttgaattgaatcgatattgacccgatcaacgtttaagccgtagccggctgttacttcgctaagttgttcaaaaagggtttggttaattttttcggtgccatttaaaacatcgttcaagtccatgttcccaataatcccacgtaattgtgcacgggtgtcttggaccatacttagaacggaatctttatttttataaacgtacgcattgacgtcagtgatgtgatatttaatcgtttccgaaatcataacaaccacgttgtctttggtaatgacttcttgttcagcgacttttaaggggatttgtttcatattaacgatttctgtgatgtgataaatgaatggaatgaccaaatggaaaccaggatcaagcgttttaacgtagacccctaagcgttccaaaatcccaacttccccggtatgaatcaaggcaaatgatgaaaagagggtgactgcaacaataactaaaacaagaatgactaaaatactgatgaaaatacccataataaaaactcccttttgtctggcttaatacgccagaatattgtggtgcgctgtcacgattaaagctaaaggtgtgacggccgttaccatgacgagtaagccagcgctagctggtccttcgacacggtaatgatataagatgccaaaaaaattaacggtgccggttgatttagcatcctgtaaagtaaacgttaaccccactaagcgttcatctaacatattccgcctccctttgttcacattgtatctgattaccaataaaaggcaactctaagtgacagtaacgaacaaaattgttaggtggcttgtctcgaatgcatgaagatagtaaactaagcgtactaaggctggaaatggaggaaccgtggatgagacgaaaagtgacaccgatttttcaagacagtttccaaaagcgctattggcgacaaataattatcggcattatcgcggtagctctgtgtcttggtggtgctatctggtggttgaaacaccgttcggatcgaccaagcgcgacgcaatatccgattctagggatgcaattaagtcagtcagatggttaccaagattttgacgggttaaaaaaggacggtattcagtttgtttatttaaaagcaactgaaggggccagttacaaggatgataatttcgacaccaattacagtcgagcaagtggcactggcttacgcgtgggcatctttcatttttttagttttgatagttcgcctgaacgccaagctgaccaactttttaaagcagttggcagccagacgggtgatttaccaattatgatctatttggattattataacgactatgcacaacaaccgcccgcacaaaagaaaacgcaaatggcactggcgcagctagtgaccttgattaatcaacattatcatcaaaattgtctcattggtggtgcacccagcttattaaaacggtatgtgccacacaaaggagactatccattgtggcaaactacgcgggaacagccaacattggcgactaagaacgggttctggcaatacacaatggctagtcagattccaaacagtgataatcagacgaactatcagttagcagtttttactggcaccaagcaacaatggcagactattaaatagaaacggagagaaaataatgattaagcacaaaggctggttattattaatcgcaatcgtggtgattttcatcggtggtagttggggaattcatagctattattacggtggggaagcctactatacacagattgtttcaaacggaacacgaatggaagaaaaggattcagcaggggaaacggttatcgattataactatcaacaagcagcctacaatgaagatggtgttaccaaaaaagttgattttaatggtaataaatcaacgccgcttaaacgaaatgcgtacctcaaattaatcgtcaataaaaataagggtgtggtttcatgggaaaaggttgccaaaaacgaagtcccagataaagctcaaaaaatgttgaacaaataaagaataactaaaaaggcccataacgctaagcgttatgggccttttttaatagctattcgattggataatccatatcttcggcttcatcgtaaatcgaaacgggccgttgattttcacaagtaatttttaattgatagccgtagtgatcgagaaagaccaattcgttttccgtaagggagatgacttgaccactcaatggcttatggtcgatttgcaccaacaggttcggtgtaatttctaatgtgtgtttttttcgggtttggttgtcattaaaagaccagtgcccagcataaaaagtcgctactttactcgcttgagtcgtccgaactttttgctgatactggtgaatggtttgatttaaaattgcttgtggtttttgaaatttaaaaaatcgcataagtcacaccccaacttactattattctaccacgaaatagttagtttacggacaattaattatcggactcacgactgtttttttaaggaatggttaaagaagtgaatagtggcggaattcttatcagtagaaaaacttttcgataggcttctagatttaaatcccgtatactggcagtattaaataagggagctgattataatgcaaacacttgggattattgggactaactggattacgggacaatttgttgatgcggcccgggaatctgaatcatttaagttaacagctgtttattcacggacggcagataaagccgaccaatttaaaacgaagtatcacgcaccagaagccacaagttacactgacttagacgggtttatgaatgccaatgaatttgaaaccgtctacattgcatcacctaatagtctgcactttgaacaagcgaagcaagcaattttagcgggtaaaaatgtcatcgtggaaaaacctgccttcagtaatccggctgaaatggcagccatgcaagcattattaaagcaacatccagaccaattcttattcgaagcagcacgtcatattcatgaggccaactttaagattgtacaacaagccatcaacgcattaccggcgatcaatggcgcgaccttgagctatatgaaatattcatcacgctatgacgctgttttagcgggtgaagaaccgaatattttctcaccacatttttctggaggagctttacaagatctcggcgtgtatgtcgtctatgatgccgtcagctggtttggtgtgcccgattcagtcgattatcaagctgaattgttaccaactggagtggatggtaaaggggtcgcaacactgcgttatccaacctttaacgtcacgttgatttttggcaaaaccgttgattcctatctaacgtctgaaatttatggtggccaaacgacgattgtcctcgataatgccggcacaatcggcagtgttgaccgctacagcgaaggtgggcaaaagattgagtcactaggggaacaatcacttgctaatccaatggttgctgaggcagaaaatttcgcggcgatgattgctaatcgtgacacaaaacggtatcatgaattattacagctaagtgaatcggtcaaccaagttttatatcaattaagacagtcggccggaataacatttgatgcagattaacatgacggaggcaatacatgagcgtttcaccactatttcaagcactatgggatgaacaaggatttacagaaatgtcacccatccaagaggcagtttatcaaccactgaaaaaagaccaatcaattctaggactggcacccacgggttctgggaaaaccctcgcgttttcattgccgttattagaaaaaattatgccgggcgaagggctacaagtcttaattttggccccttcacaggaattggtgatccaaacacgggacgtcattcaaccttatgccaaggcaatcgactgtaatgtccaagcgattacggggaaggcgaatgttaaacgccaaatcgaacggcttaaggccaaaccagagattatcgtggcaacgactggtcggttattagaattgagcgaacaacggaaagtgaaattccatacactccaagcgattattatggacgaagctgacgaattattgacggatagcgggctttcagaaacccgccatatcgtgcaagaatcacctgccgatgtgcaacttggcttcttttcagcgacatcaaccgatatcttattagagttggaaacatggttcggcgtgccaatcgaaacaatcgacgtgcgtgggattgataagacgggtggggaagtgttgcatgcatttatcccaactggtaacgctcaaaaagtgaacgtcttacgccatttagcacatcaaaagaattttagaggtttggtcatttttaaccaatctgcgcaactcttacaagctgcacaaacgttaaaacatcaaaaagtaacgtatgccgcactctcagggcaaggtcgccaaacagaacgccaaaaagcgctcaaagatttccgtgaaggtaagattcaactcttactagcaacggacgtggctggccgtggcttggatatcaccgacttaccttatgtgattaattttgatgtaccaaacgcaaaaatcacttacattcatcgtgctggtcggactggtcggatgggacgcacggggactgttttgacgttgggcaatcaacacgatgggcggaatttgcgtaagttattggcgcctgaatatgatcttgtgacccgttatttggtcggtgaccatttggaagccgaaaaaccagtgacgcctaaagtagcaccagttgctgcaacgaaagcaacatctgctgtaccaactactggtgaagcaacagaaggacaagtgcaaaaggctacgccgacgacaagcgcgcgcaaagccaaattagtaccagttcgccaacagccagctgcaccattaaaaccaaaacataagaaaaaccgtaaacgaaatcaaaagaataagggctaccataagaaaaataatgactagtggtctaatccagattgagcgagaaaccttaacaacctgttaaggtttcttttttttggactagtccgtttgtgaaaaggttatcagtaattaattgacaaatctcaggaagcgattacaatataagtaagggttttctttcgcttcgtaaaatgcgatagtggcgaactctcacaatcaggaactaatttttgaaagccttttaatggattggttagtcattctcgaagaaatatctagaccaattaatgaatggttacgaaagtggttcacgatgagatgatcataggaggtgccatactatggcagaagaacagaacttagaagcaatcatgggattaattatcaacggtgggaacgccaagagtagctcaatggaagcaatcatggccgctaagaaaggtgacttcgaaacagcagctgccaaacttgcagaagcggatgctgctttatcagaagcccataattcacaaacagatatgttaaccaaagaagcaagtggcgatcacatgcaagtgacattattgacggttcactcacaagatcacttgatgaacgcaattactttccgcgatttagcaggcgaagtcgttgacgtttacaagaagatggccggtgtaccagtcgattaaagtttggctaatgaacaaaagggctaggacaaaatgacttttgttcgagccctttttagttaaaagcaacaaatggcacattgaagagaagagtgggaacgggatggaaattaaattaaatttaaaaatgccagctagttatttttatcagaagattctggaatcagtgttgtttgatattaagcaacaaactggggataaactaactgaagcgcagttgcctaattattcgtacgacaagcaatttggcaagaatcgggcgacattgaagattacgcaactgattaaagatcagagctatcactacgaaacgacttctacccgggggagctatcaatcaagttacgatattttcgcgaatggaccgcagtctattgaagtcatctatcgcgcaaatgccaaagcaaatggcaaattacaacaaaccaatgatatgttgatggcctttgtcatgggtttcatgcgtaaacgcggctttaagaaaatgttgaaacaaatcgaaaaagcatatcaagcagaacaataagcaatgactttgagagaaagtaggatgaccagtaatggaataccatcaattagcaccatttcctaaagattttttgtggggttcagcttctgcggcctatcaaattgaaggggcctaccaagaagatggtaagggccgttctgtgtgggatgaatttgtccgcattccaggcaaaacgttcaaagccacgaatggtgatgtagcggtggatcactatcaccgtttcgaagaagacgtggcgctaatggcacgcgctgggctcaaagcctatcgtttttcgatttcatggccacgggtcttaccaaatggtaaaggcgctgtgaatgaggcgggcttagccttttatgatcgtttaattaatacattaattgccaatgatattgaaccaatcgtgacgatttatcattgggacttaccgcaagcgttgcaagccgaatatggcggttgggaatcgcgtcaaattattgaagattttaccaactacgcaggcttattgttcgaacgcttcggcgatcgtgtgcaacattgggttaccttgaacgaacaaaatgtcttcatcactcacggctatttaacagcggagcatccgccagcagtgactgatgctaagcgaacttatcaagctaatcatatggcaaaccttgccaatgctagtgcgattaaattattccatgaaaaaggctatcaagggggcatcggacctagttttgcctacagcccaacttatgcgctgaatgcggacccagaaaatcaaattgcggctgataatgccgaacaaattaacgctgatttgtggatggacgtttatgcttggggccgttatccgaaattagtgatgacttatctcgaacgaaacgggattgcacccgaaattactgaagcggaccaagctttattagccgatccactcgcacatcccgattttatggggttgaattactatcagacgatgacggttacgactaatccattagaaggtggcgttggtttgaccaagcaaaatacttccggtaaaaagggcactagccaagcaagtgggttgccaggcgtctacaagaccgctgataacccctatatgcaacaaactgactgggattggaatattgaccccgaaggacttcgaatcgcactcagacgtattgagagccgttatggactgccggtcttaattactgagaacggtttaggggcttatgacaccttgaaagaaggcgggcaagtgcacgacgactaccggattgcctttttaaaggcgcacgttcaagccatccacgaagctattaccgatggcgtttcggtcatcggttacacgacatggagcttcacagatttattaagttggacaaacggctatcaaaaacgctatggcttcgtctacgtggatcgcgacgaaacagaagaaagagaactaaaccgctatccaaaagacagtttctactggtaccaaaaagtcattaaaagcaacggggaaatactatagagtgcgcagtcgaacgggttggctttgaggattaacagaaaaatacatattatggcgggtttaagccataatatgtatttttaggttatccggaaaaacgagttcgtttcaaccctccactttctttttgcctttagaacgcttagaatatagcgtaagaaatcaagacgaggtggcaatatgacaacgcaagaacgacgtacagcaattctgaatgcaattcaaaagagtgcgcaacccatcagtgccaaagtattagcgcaacaatataaagttagccggcagacaattgttggggatatcgccttacttcgcgcacaaggggcccaaattattgcgacagttagcggttattacgaccaaacgcagacgcaacaaacaatgccatatcaggcacaagttgcctgtcagcataatcaggggcagactgaactcgaattgacaacgattgttgaaaatggggggcgcgtgatcgacgtgaccgttgatcatccattgtatggtgaactgaccggtcaactgggaatcggcaccttgacagatgtcaaaggctttatgcaaaaaatggccacaatgccccatcagaaattactttcaacattaaccgacggcattcatttacacacgattgaatgcgcgtcagaacaacgatttaagcaaattgtcgcagcgcttaaacagataaatatttattataatgcataattaggtgtcttgacatctgtaaactctttttgtatgataggaccattcataacataagggagtaatgcgggatgacaaaagaacataggacacttttatgggctgcaggtggtgcatggttgttcgatgcaatggatgtggggatgctatcgtttgtgattgctgcgcttgccaaagagtggcaactcagtagcgcacaaatgggattaattgggagtgtcagttcaattggaatggtttttggcgccgttattttcggcattttagctgataaaattggtcgaaaaaacagtttactttgttccttattagtgttttcgattggcaatgggatatctgcctttagtacatcgttgagtctatttctagtactccggttattggtcggtgctgggttgggtggcgagctaccggtagcctcgacattaatctcggagaatacgccaacggcatcgcgcggtcgggctgtcgtattgttagaaagtttttgggcagccgggtggttagttgccagtttactcgcctattttgtcattccagtttggggctggcgagtggtcttattgatcacgtcattgcccgccatctacacacttgtgttacggaaacatgttaaacaagagcatgaaccgacgacgattaaccgtaaggtaccattcatgcaacgattgcgtgttttatttgaaccagcgtatcgccaaagaacaattatgttatggctcgtatggtttttagtggtcttttcatactatgggatgtttttatggctccccagtgtgatggtcttaaaagggttcagcttggttaaaagttttgaatatgtgctgattatgaccttggcacaattaccaggctactttgtagcagcgtggttgattgaaaaatgggggcggaaacgtgttttaggtggctttctaatcggaacagcactcagtgcattattgtttggcaatgcaaactcagttgccatgttactcgtggccggtgcgctgttatcctttttcaatcttggtgcatggggggcgctatatgcttataccccagaacaatatcctgcacttgtccgtggaagtgggagtggtttagcagctggcatcgggcgaattggcggtgtggttgggccatttttagttggtgcgctaattcagcagggggtatcagtagccgtgatttttacactttttacgggtgcgatactattagcggctggtgccgtgttctttttaggtcaagaaacgatgaacgccgttttaacggatgaataaagatttattaaaatcaactttacaattaaaacaacagatgcgacaatatgactcataggcgctcgtggctcaactggatagagcaatcgcctcctaagcgataggttgcgagttcgattctcgccgggcgcactttgaagcaattgtcgtaaaagcacactagattaactagtgtgctttttaattggtgtaaaataatcaagcagaatgattacgctttcactttcagaaagttacggatttatgatttatattaggtgaaaatatgttaaaatagattcgtattcaaaaatcgcaacgcaaaagttgcaattaatctggaggctttttcatgtcattagttaatggtacagaaatctttaaagctgctcgtgaaggtcattacgctgttggtgctttcaacacaaacaaccttgaatggacacgtgctatcttaggtgctgctcaagaaactaacacaccaatcttgatccaaacatcaatgggtgctgctaaatatatgggtggttacgaattatgcaagaacttggttgaacaaacaatcaagtcaatgaacatcacagttcctgttatcatgcatttagatcacggtaactacgaagctgctaaagaatgtatcgaagttggttacaactcagttatgttcgatggtcatgatttaccattcgaagaaaacttagcaaagacaaaagaaatcgttgctttagcacatgctaaaggcatctcagttgaagccgaagttggttcaattggtggcgaagaagacggtatcatcggtgctggcgaattagctgacgttgaagaagctaaacaattagcagctgctggtcctgactacttagcagttggtattggtaatattcatggtgtataccctgaaaactggcaaggtttaagctttgaccgtttacaagaattagctgacgttattgacttaccacttgtattacatggtggttcaggtattcctaaggaacaaatccttaaagcaatcgaaatgggtatctcaaaagttaacgttaatacagaacaacaaatcgcatggtcaaacgctgttaaagaatactatgcagaaaacaaagatcaagctgaaaaaggcttcgatcctcgtaaagttcttgcaccaggtacaaaagcaatcaaagacacagttgaatcacgtatcgaatggttcggtacaccagctgttaaataattattgtttttcaagagtccaacttcggttgggctttttttgtggtttcatgctagaatgagagcaaaataaaggtggggataagatgacagttattgagcaatataatgcaggccttacaactgatgctgatcgaacactcgcactggcaatgcacaccattcttcgggcggtgttaccggacgcagagatgaagctggcttatggtttggttgggtattatcagcctaaagcagtttgctattttggcattaataaacggcacattgggttttatcccactaatcaaccgatggcccattttgcaaaagctgtcgcaccatgtcagaccggcaaagggacactacaattcgaaaaagatgtaacggcattaccaatcgagttgattcaaactatcgcgagttggcaattagaacacgttaataaataaggcttacccaaaatgggtaagcctattttttaatgaccactcgtcattttaatgccgagaattccgattactaataaaataacgaatagccaggttaataaagaaatgtgttcattgaataagatgatgccgactaaaatagctcccactgcgccaattccggtccaaaccggataagcaatgctcaatggtaatcccttcgtcgcacgaattagaaaaccgaagctgacgagcatgccagcaatcgtcagtaatgtgtaattgagcttagtgaacccaccactcattttcatagtcgttgcccaccaaacttctgccaatcctgcaatcaataaatcaacccatgccacacaatagaacctcctaataatatcggccacaaaaaaaggacagccaatcacttcttctttgacctaatgaagtgattaactgccccgtggcgacgattaaattaaatatagcatagcaatttttaggttaaaagtgaagcttagccgatagaaccaccaattaaataggtgacgaccatggttaagacgccggttaagacgttgcgtaaaacgcctttgagtcggtttgccttgcctaacgttgcactcgtgtaaccggtcgcgataagggcaagaacaattgaaccgatagttccactgactttgtaagggtatggaattgctaggatggcgatgattggcagcaatgagcctaacatgaatgagaaaaatgatgaaaaggcggcatgccacgggttgaagtaatggtgtaattcaatattgtatttttcgcggagtgtgatgtcaagactgtctttttgcatgaacgctgaagctacctgatgtgcaagtggagtgggtaagccttttgattcgtaagtccgttgtagactggccacttcagcagcgtattcgttttggatggcttctttttgaagccgcatcatggatttctgcgtgtcacgttgcgtgctgaccgagacgtattcaccgccacccattgaaaaggcgccagcaagcatgccagaaataccagcaagaaaaatcgtgtactgactttggtgggcgctcgcgacaccgactacgattccagctacagagataatgccatcatttgcacctaaaacgccggcgcggataatgttcaaacgttctgataaatggaaacgatgttcgagtggtgcactggcggataattctttcataatggcggactcctctggttgatttaacttcattatagctaattgagaaggattatcaattgtttttgagcaattgttcacaacaaaaacattgtataaaacctgttataccagtacatacgaatcattattactaacgaataatgatatagtgaacaaaaagtatgccaacagtctagcacatcaaaaagggtcgcaacaaaaaattttgtcgcgaccctttcgaattataaatgtgtcagtgcttggtagtagaagaatgccgtgattgcggttaagactaaaccggcaacgcacacaatgattagaccaccaatcgcttgtttctggtaggcgctataggcggttagtccaatgaagaaggtggttagacaaacgcagacgccaaggagcatgagccatgtaatcattagtcagcccagtcaccgtttctgaaaatggggacaatctgaccgtcgtgtgttaagccatcgatgttcatttgactggaaccgaccatgaagtcaacgtgggcttgacttcggtttaaaccagctgcttttaattcctcttcagacatatctgtgccgccttcaattgaaaaggcgtaagcagagccgagtgccaaatggtttgaagcattttcgtcaaataaggtattgtagaaggtgatctttgattgtgaaattggtgaaggatctggtacaagtgcgacttcacctaagctcttgaccccagcatcggtttgtaagagtttttgtaagacatcgttgccttcttcagcggtggctttgaccactttaccgttttcaaaagtaaattgcatgttgttgagtgtgttaccagcgtaactcaatggtttcgtagaagaaatgtagccatcgatgttgttggcatcagctgctgagaaaacttcctcagtaggcatgttagcgacgaatgaacgaccatcactactacgactaggaccacccatccagatgtggttttcaggtaacccaattgtgagatcagtgccaggggctgtgtaatggagtgctttgtattgcgcagcgtttaattcagcggctttggcttgcagtttcttaccatgttgttcccaagcaaggattgggtcttctttatctacccgggttgttttgaaaatctctgtccataacttatcagttgcggcttgttcgtccatatcaggaaagactttctttgcccaagcgggactagctgcggcaattacaatccaactatttttgttggcttgtgttgcttggcgaactttaagcattgcttgaccgtttgctttttgaacagcagcgacccgatcaccatcgaggcccttaaggttatcaggattgctcgacatcaccgaaatccgtttggcgttatttgctaaccagtaatcgtattcttgtttttggaagtctggcacgttaacgaggcgatcttcggctttgtgttgcatattgattcgatcgatgtcgtcatcttgccatttaataatcacttcggctgcaccgaggtcatagcaagcagctgtcatatcacgggcgaattcagcttgatcaacagcgatttggagcaccactgtatcaccaggttggacgttaattcctgttttagcgactaaagcggcgtatttttcaagattatgttggaaagtagtcatcaaaaattcctccttaagggcgatttaatatgtttatcatagcacatggcgatttaaaaaactcgtaaaacagataaaaacgttttcatgttatttaattttgtggtagagtgacagtagataatattgaaaaacggattgatcggttaaggagtgggaacgatggcacggacaaaacggattaaagcggagcaaattctggataaagcatacgaaatggtattagcggatggtttaaaagcaattacagcgcgcagccttgccaaggcactagactgttcgacacaacccatctatttagaattcggtaatatggccaatctcaagcaagccattttggaacaagccaaggcgcgtttggtgtggtatgtcagtgaagaacaacgaacagatgatgccttagtcaatctcgggattggctatattcattttgctacaatcgaaccagaactttaccgtgcgttatttattgataaccactttggtaaggatgaagcacaacttttcatggggcaattgacacaaactagattggaggactatcaaccgttaaaaacggttagtgagtcagaacacgaacgcattattaacgaagcgtggatcattattacgggtttggcaaccttaacgaatgcgaagttggtacactatagtgacgtagaaatagacgcgatgctcaagcgaatgttgaagcaatgtttttaaaaagagacgcctaaaaaggcgtcctttttaatattcagactgttattcatttgactcaagggaataagactgcaatggattggcaaacccttataaaacatgtaatataggaggtgttaacttattaaatggtaggaggcaaatttgtgtctaaaattaaagtaatgactgtttttgggacacgaccagaagcaattaagatggcgccgctagtattagcattgaaagaacgcgcagatgaattcgaagctgtgacggtggtaactgcccaacatcgtcaaatgttagatcaagtgcttgaaatttttaaaattaaaccagattacgatttggacgttatgaaacaacgacaaacacttagtgaaattactagtaacgtattaatgaaccttgataaagtgattgcaactgaaaaaccggatatcgtattggttcatggggatacaaccactactttcgcagcaagcattagtgcattctacaatcaaacagcgattggccatgttgaagcaggactaagaacttgggataagtattcaccattcccagaagaaatgaatcgccaattaacagatgtactcagtgatctttattttgcaccaaccagtcaaagtgaagccaacttattacaagaaaatcatccacaaaaggctatttatattacagggaatactgcaattgatgcattgaagcaaacggttcaaagcgactacaatcattcaatcttggatgttgttgatgctgacaaacgaatgattctagtaacaatgcatcgacgtgaaaaccaaggtgaaccaatgaaacgggtcttcaaggtaatgcgccaagttgttgaaacccatgatgatgttgaaatcgtctatccagtgcatttgaaccctgttgtgcaagaagcagcgcaagatatcttaggcaatcacccacggattcatttaatcgatccattggatgttgttgatttccacaacttagctgcacggagtttcttcatcatgtctgattctggtggtgtgcaagaagaagcaccgtcattaggcaaacctgtgttggtcttacgggatacaactgaacgacctgaaggggttgaagcaggcacgttgaagttggttgggacacaaccagaacaagttcatgatgccatggttgaattattagatgatcaagccgtatatgaagcaatggcccatgccaagaatccatatggggatggacaagcatctcaacggattttagatgcaattgcttatcattttggtcaatcaaaagaaaaaccagaagcgtttaaataatgagcattgaaaaagccctcgaccattatcattttgactgataatggcgagggctttttttgatgagataaacgtgcggattcaaactgttttttgtcttaatactcagttgctaagtgcaaccaaacgcactttatttcttttctttcacaatatacactggtctgtttttaacttctaggtagattttgccgatgtatttgccgacaatccctaggcataggagttgtaaaccgccgaccattaggataactgaaatgagtgatggccaaccgcttgttggatcgccaaaaatcaaagcacgaataacgatgaagattaatgcaagcagggcaatcacgaatgagaaaaagccaacgaaggacgcaatggctaatggtgtttctgagaaagttacaatcccatccaatgaatatttgaagagtccccagaatgaccaactggtttgaccagcaacgcggtcttggttcttatattctaagtacttggtgtcaaagccgacccaactaaaaatcccttttgaaaagcggttgtattcagacatctctaagatggcattgaccatctgccgagtcatcaagcgataatcacgagcaccatccacgatttcagtttgtgaaattcggttgataatcttgtaaaattgtttagcgaagaacgaacgaacggggggttcgcccgcacgtgttgtccggcgagtgccgacacagtcgtagccttcgacttcaatgccgtgaatcatttcgggtaatagttcaggcggatcttgtaagtcaacatccatcactgaaacgtagtcgccagttgcggcttgtaagccagcatacaaggcagcctctttaccgaagttccgagagaatgaaatgtagtgaacgtgttcagggtcttgtgcctgtaacgcgcgcatttccgccaggctttcatcagcagaaccatcgttaacgaagatgtattcgatgcggtggtcggctagagtagccgctactttctcaactgctgcgtagaaaagcggaattgattcttgctcgttataacagggtacaataattgaaatcgtcttagtcatcttaatcctccgaagtatctttgaaaatccatttgctaaatacatagttcgctaaaatcacgataatctgatctagcactttaacaagcatgttgggccataccaataaggaaatcccaacaaacataattgcagtatccattataaatgatataccacggaagaaaaagaaactagccatctcgcgggaaaagtcctttaaagttgtatattttgactgaaagacccacgttttattggtgaaaaaggcaaatagcacggataagaaccaggcaatcgtgttgctgacgagataattgatagttgtatagtggtctaatccgaagaaaacgaccatgttgactagggttgttaagacaccaaagaccaagtacattaattgttcccagtatttttgaatgagttgttggatggctttaatcattgtgacctcttttcaaaatggcattgtaccgccggagaatccgctcccggagtgccatttgttgttctgtttttttgaaagtgtagcgggtggtgatgtagttgacaatgccgacaattaactgatcgataatcttggcggtcatactctgccaccctaagaaggagatggcgacaatcatcaaaccgttatccaagaaaaaggatacaccacggaaaaagaaaaacgaaagcacttcacgacacacagcgccaaacgtggtgtatttggattggaatacaagcgacttattggtaaaaaagccaaataaattcgcgacaaaccacgccattgtattggcgagtaaatacggccaaataatggtgtggcgaaatacccagtaagtaaaaatattaaccaacgatgctaaaaaaccaaaaatcgtataggtcaaaaaatcgcggtatttaaacactaaccgtttaatgaaagccataaagacagctcctagtttgatttattaaggtctaaaagaccaaaagaagggccgcggtaaaaagggacgtaaccgcggcccagggaagattggttgaaacgtgcttgttgaaacatacttctgcgcttaaccaaatttaccaaataggtgattgcatcacctattcggcaaatccagttaatgctcaaagcataaccgtttcaaacgcactctgccatgaaacgtgcttgttgaaacatacttctgcgcttaaccaaatttaccaaataggtgattgcatcacctattcggcaaatccagttaatgctcaaagcataaccgtttcaaacgtactctgccttgaaacgtgcttgttgaaacatacttctgcgcttaaccaaatttaccaaataggtgattgcatcacctatttggcaaatccagttaatgctcaaagcataaccgtttcaaacgcactctgccatgaaacgtgctttataagctagtatcctgtgcctagctacgtccggcaaacagccaacttgttggctgtttgccagactaggttagtgctcggatactgaccgagcttatagtgcactttgttttgcaacaatctctgatacgaatttttcaagatgttcgatatcttctgcttctgctgatagatcgactttgacaacgtctgaaccctttgttgcgccggtttgttcgaagacggctgcaaaatcatcaaccactttacagaagtcatcgtagaacgtatcaccggagccacagacaccgtagactttaccagttaaatcaatatccttgagatcttcgtagaaatcaacggcttcatcggggagatcgccatcatcgccataggtgtagctgcagacgatacagatatcgctgtcttcaaaatcggcaggatctgcttgagagatttcagtggtttcaacgtcgacgttcaaactttcgagggcttcttcaacgatttcggcaatttcctcgttattgccggtcatacttgcatagactactttagcagttgccattattgggacatcctttcacgtacgcggcgctcagtggccgcaattaacgaattatactataaggcattatagcaaaagccccttattaagaaaaggtgcaacggctctttcacggttaattgaactaaaaagcgacgattcgtccattttaatggcagatagcgtataatatagaaatagatacaattaaaggctacaatggtaacaatattggaggtttcattttgattacattaaaatctgaacgagaaattaaagggatggctgcttctggcgccattattgccggcgttcatcgcggtttgcgcgacatcatcaaaccaggtatttcgagctgggtaattgaagaattcgcaaacgactacatcgaacaacacggtgccaaagcatctgaaaaaggctttgaaggctacaagtacgcaacttgtgtctgcgtgaatgaggaagtggcacatgccattccacggaagaacttaattctaaaagaaggcgacattgtcagtgtcgacatgaccgttaacttggacggttatgaaagtgattcttgctggacttatgcggttggcgaaatcgcaccagaattacaaaaattaatggacgatacgcgtaaagcactttacttaggcattgatcaagccgttgtcggcaatcgcctaggtgatatcggccacgccatccaacaatataccgaagttgaaaacagctacggtgacgtccgtgaattgattggacatggtattcaaccaacgatgcacgaacaaccaaacgtgccttcatacggtgaagcgggcaagggcttgcgccttaaagaagggatgaccatcacaattgaaccaatggtcatcttaggtggcacatggcacatcaagtcaaaagaagtccctggcgaagactgggaatattacgtctcagcagatggcacaccatgtgcgcaatatgaacacacaattgcgattaccaaagatggtcctaagattctaacctcacaagatccagaaatggatgctaaatatttactataaaattagaaaccttctctaaaatgagaaggtttctttttttgctttcagacaactattagcccatagttaattcgtgtataatagaaatgataaacatgccttaagaagtcgggaaaataagcctttcaggtagaacgactaatgtgtaaaagagaatttggagtgacatatgacagtagacaatcaaaaccagttaccggtggtaaaacaggacttatccagacggcagaagttgattgctgtggtgaagttaatgatgttgcgttcatcagaagcaagcattagtgataattcgaaggtaatcgcatattattcgttattatcaatcttcccactattaatcgttatcgggaacatcttaccgtacttccagttagatgtaatgagtgtggcggattacgtccaaacggcggtgccgcccacgatattcgacaagattatgccagttctgcagtccctattgaagaaacgcaatgatggcttattgtccgtcgggatcttggggacgttgtgggcagcgagcatggggattaatgccttaaaaaatagtattaaccgcgcgtatcgtgttgaaaaagttcagaactttgttttaaaacgcctgatttctttggggagtacattattattactgctattattagtcggtttaattgttgtttttacattcgggcaacaagttttggaattattagtcccaatctttaacattcctaagacatacgttaatatttttagtagtttaaaatggccagtgacggggatcgccttgttcctactgctgattttcatctatttcttcgttccgaatgtgaaaatgcgattgcgaagtgttctgccaggggcagcactgacaacggttggctggttaattcttgcacaagccttctcattgtatattcgttacttcggcacgtcatggaatagttacggtgcaatcggtgcggtgattatcttactcttgtggctgaattattccgcaacgattctgatggttggggctgtcttgaatgttgtgattgaagaagcactgcatgggcatgttaacgccagtcgcggtaaggttcatgacttcattgcgcgtcggcgcgatcaaaatgaatgacagccgaaaaattaatgagacaaagcacaaatatgaattgaaacgttaaccaattatataggttgtaagaattcgggaatcaaccggatgattacaacctatttttagtctctaaaattaaaattatttatctcaaccgatatgtcaaactaatgtttttacatatcggttttttgatggacttagatttcgtaaaccactttcactttcgatactttaaaaatatttaattatttaaaaatcttgaatattgaattaccgcccaatgttaagggggttattcacaatttagtgtgaaaactaagtgttttttattaaggtgtattccagaaaaagatttcctttttaataaaagttatactataatagaaaatattgtagtataaatagtatgtaatgtgattgattatttttttgtttagttttcgaggaggatacgaaacggatgactgcagaagaacagaagcgacaccatcaccataagcaccggcgcagagggtggacattaacaaaagtgattttagttgttcttggggtattgattcttgccgggggcgcattcgcagctaaggtctatatggatgttaatcaaaccgccaagacagtgtataaatccaaaggtaagacacaaaataagcgcaaagtttcagaaaaagtcgaactaaataagaagacgcctttctcgatcctcttactcggtacagatacaggggaactaggccggaccgaaaaaggccggactgatacgatgatgcttgcgacggttaatccaacgactaaggaaactaatatgttgagtatcgcccgtgattcaagggtaccaattgttggctatggtcagacggctaagattaatgccgcgtatgcctatggtggaattccaatggcagttaatactgtccaagcattcttaaacgtaccggttgattactatgtattggttaacatgaagggcttggaacaattagtagatgcggtcgatggggtgactgttgagaatgatttagacttcacacaagatggacgtcactttagcgtagggcccgtatccttgaatggtgaagaagcattggcattttcacgaatgcgctacgatgatccacgcggagattttggtcggcaactccggcaacaagcaattgtccaagcagttttgaagaaggctttttcattgaatatggtgacgaattataataattttttacaagtcttagaaaataatatgcaaaccaatattaccttgaaagatgcaattaatatccagaaaaattatggggatgcaatgaactttaagacgcatcaattgaagggaattggtcaaatgattgacggacaatctttccaagtgatgagttcatctgaagtggcgaatatgtcgagacttttaagaacccaattagatttaaaataacacgggaggaagctaaccagcgatggttaacttcttttcgcgtgttgcaaagtagttataagcattaattaacttttggagggtatcatggaacaaacaatcaacattgagcaaattttcggtattttacgtaagtatcaccggttaattctatcatcgacagtggtgtgtacattattagctgttatcgtgacattctttttgattacaccacaatatagcgcttcaaccgaactgttagttaatcgcaagcaaagcggtgatgcaaatgtccaatggaatcaagtccaaaccgatgtacaaatgatcaatacgtataaggatttaattacgaaaccagtcattatggattcagtcgctaagaaaattaacaagggtagcaatcaaaaattagacgatacaactatcgcaagcatgattggcgtttcaaataatcaaaattcacaagttttctcaatcactgctaaagcagataatgcttatacagctgctgatattgccaatacaacagcgcaaactttccaaaaaaaggcacccaagattatgagtgggacagataatgtatctattatttcagaggctaaacctgatttaaagccagtttcacccaagaagaaattaaatgtggtaattggccttgtgttaggtattttacttggtgttgggattgccttcttacgcgagttaacggacaagacagttaaggacgaaagcttcttaacagacgacttaggcttaacaagtttaggtgttgtgaataatattgcgggaaaagatttaatcaagaaagcgattatgagcgtaagtaccagccgcttatcaagaagagggtaagaaaatgggattatttagaaaagaaaagaaactagaccaagatagtatgaaagaaggggtcggtttaattactttaactgatccgacttcagttattgcggaacaattccggacaatccgcacgaatattcaattttcatcaatcgatcaaaagttgcgcagtgttgtcttcacgtcatcaggcccttcgcaaggtaaatcaacggtaagtgcgaatgttgccgtgacctgggctgatcaaggggtagatgtcttattggtcgatgccgatatgcgccgtccaacagtccatcaaactttccaagtgccaaataaaaaaggcttaacatcactattaacggaagaaaccttcgatttaaatagtgcgattcaaaaaacaccggttgatcatctattcgttttaccgtgtggtgtcgtaccaccaaacccgtctgaattgttaaatacaaagaaaatggataaattaattttagaattgacaaagcactttgatttagtgatttttgatacaccacccgttatttcagtaacagatgcgcagattttggcaagcaaagttgatgggacaattttggtggtaccacaagggattgttgaaaagggttcggttgccaaggcaaaagagttgttagaagtcgttaatgcccgaattttaggaacaattatgaaccgcgtgaaggctgagaatacgggcggctattatggcggctattatggtggttattacggagcagaagagaacaagtaagatttaaatttgggggatataaataatgagtaaagttttaattacaggtggcgcaggctttattgggtcaactttagcagataaattggtggaagaaggtaatgaagtggtcatcgttgatgatctttcgatgggatccaccgaaaatattccacaatccattaatgttacattctacgaagaatcaattacaaatcatttctttatgactaagttattaatcaccaacaattttgattatatctacctattagcagcggttgctagtgtagcggattcaatcgaaagaccgattgagacgcatgcggttaatcagaatgctaatttgaatattcttgaaacaattcgcaaagaaaaattaacacctaaaaaaattgtttttagctcttcagcagctgtttacggtaatggtcctgaattaccgaagaaagaaacttctgcaattaatccaatgtcaccatatgcaattgataaatttgcgactgaacgattcatggttgattacggtcaactctacggattgccaacagtatgtacacgttttttcaatgtctatggaccaaagcaaaaccctaaatcaccgtattcaggtgtattatcaattatttcagattgtttagtgcgggataatatttttaatctttttggtgatggaagccaaacccgtgactatgtttatatcgatgatgtcgttgacgcattgttgctactagcaacaacacctgaagctaagcacgatgtttacaatgtcgccacaggtgaaagcatcagtttagttaatgtgattaaagcatacgaaagtgcagtaggtcggaaagtcaaagttgttaaaaaagaagctcgattgggtgatgtacaggactcattagcagatattacgaagttaagaggcttaggttacgaacctaaagttaacgttactgctggcttagcaaaatattgggatgcgttacaggaaaagtagggggggatacttttggaaacaatgctgaagaaaaatcaaagcgaagtttgtgaagaatcatatattaaaaaattggatgggatgttagaacatccgtacataccaatcaagcatattttggatgtcgtatttgcgagtatcattttaatgattacatcaccagtcattttattatttatgttacttgtccgtttagagaccccaggtggtgttttctattcacaagaacgagtgggcttaatgggtaagaaattcaaagtgacaaaattacgttcaatgtatgctgggattgaaaagaagagtggcgcaatgtgggcacaaaagaatgatccgcgcgttacgaaaattgggcattttatgcgtaaaacaagaatcgatgaattgccacaactatggagtgtgatcaaaggcgacatgagtttaattggccctcgtccagaacgtcctaattttacagaacagttttccaaagaatatcctggatttgaacaacgtttacggatcaaaccaggtttgagtggctatgctcaagttcacggtggctatgatattacaccaggtgaaaaggcagaattggataactattatattgaacattttggtgttaaagaagatatcaaggttttctttgagaccattcgggttgtagtaacgggggatggagctagataaaatgaagattgtatatgtaattacaaaatctgcgtggggtggagctcaagttcatctatttgatttaatcaatgacagaatagcaaatggtgatgatgtaagtttaatagttggtgaaaaaggagaattaactcgaagactggaagcttcagggtgcaatatagttattttaccagtgttgcaacggaatcttagtctaattaaggattttctttccataatccgattaagaaaaatactaaaaaaacttaatccagaaatactgcatctacattcatcaaaggctggatcaattggaagaatagcgggcataggactaaagtgtaaggttattttcacagcgcatggttgggcgtttactgaaggagtaagcttaaaaaagagatatgtatttggaaaaatcgaaaaatttttagctaggttcactgattatatcatttgcgtatcgaaatatgactacaagcttgcagaaaagattggtttatttgatcaatgtaacgggaaagctatacaaaatggtgtaaaggtacctgaattatatactaaacctcaaaataatattccatatttaagtatgactgcccgttttgacaatccaaaaaatcaagaactattaattgaatctctcagtttattacctaaatcaataaaatatgagtttcattttataggaaatggtcagaattatactaaatgcaaaaacatggttagcaaatatcgactagaagatagggtttattttgagggctttcaagagaatgtgtcagaatttctaattaaatctgacataaatgtattaatttctaattatgaaggattacctttagggcttattgaagcaatgtcatatgaaaatgcaattgtagcaagtgatgtaggtggaatatcagaattaattgacaataaaaagaatggaatactgttgacgaatgatgtaacagaaattgcaaatgaactaaataagttattaagtgatacgaatcttattggagactatggaaaaaaatcaaaagcaaaattcgaaaaagacttcagtcttagtagagaattgaatgaaattaatgatgtctatttaaaacttgtgaaagaataggtgctttatggaaaaagtgatgcatttactatttagtgaggcaaattctataattaatccgaacagaaattaaaaagtcccaagcaatccacttaaaatggtagtagctaattccaaccaatgtaaggagtgattaatttgggtacatccactttgtcacgatttcaacgaggcgtattagcacaactttagccggagaacaactgatggaatactagcagaacttgaactaattaatcaacgaccattaaaatttcatcatcaaccgacgataattgactgttttcatgcttgttcgaattaaacttgtaatgtgccaatccatcatataaactagtattaacttctgattcagatggaacaattagttaatactacatacttaatatataagtttgtaattctgttttcggtagttaccgtgttattgaaagtgtgagtaaaattagaatactgattacagtaaaacgcatctttgaactactttttagaactttttaattaataattgtgagggtttttatgtcaaaaaatgtacgcgcgttttataatcaagttagccaaatacttttagctaattgataaaataaaaaacaccaagacaaatctctgttatcattgatgttcctacacaaacaatgaaagaggttattgtcttgatgcaagaacagaataccacagtcagaaaaaaaggtcagcacctaacttcgtttgaacgaggcagaattgctacgctgcacagccaaggctattccaatcgtgcaattgccagagcgcttaatgtttgtcatcaaacaatcaataatgaattgtgccgcggcgagatcgaccaagtaaaaaaagtgaatggtcaacgccaatattacgctgtatactcaccagaaacagcacaagctaagtacgaagctaatcgagcccactgtcatcgacctttgaaactcgtcggtgtcgctgattttatcgactattttacgactcatttgcgtcaagatggttggtcgcctgatgcagcagtaggacgggccaaacttgaaggcttatatcaacctgaggagatggtctcgaccaagacgctataccactatattgatgcccagttacttgaagtccgtaatcttgatctactcgaaaaaacgcgccaccgtgctaaacatcatcactcgatcaagcacaagcgtctggccggacggagtattgatgaacggcctaaaagtatcgaccagcgccaagagttcggccatttcgaattggacaccgtggtgggcaagcgcaacggtcaagagagtgtgatcttaacgctgatcgagcgtcaatcccgctgccaaattctacgtttgatcgatggtcgtgatgccgattcagtcaactatgagctggccaagatctgtcaagaatacggatcaatcatgaagtcagttactgccgataatggcgctgagttctcggaagttggcgctgtacttaccggtgtcgctgacctttattatgcccatccatatcgttcctctgagcgtgggactaacgaagcgcataatcgaatgatccgccgcgatgtacccaagggtctatccatggatattttgggtcctcatgatatccaagcagttgagtcaaagctaaacaatttaccgcgccggcaaactggctatcaaacacccaaagagcttttctccgctgcttccgccggttaagttaagtccataaaatatgaatattaatgaaaatactgatttaataggatttatcgtgtggctaatttgttcttgcaatttgggacagtaaaacgcatctttgaactactttttagaactttttaattaataattgtgagggtttttatgtcaaaaaatgtagcatttaatattgattttgtcgtgctttgggtagatggagacgacaaaaagtggttaacgaaaagatctcagtatagtcatacggaaaagcagaataatgctgtaaggtttagagattatggaacttttaaatattggtttagggcggttgcaaaatatgctccctgggtacatcatgtctatcttgtgacagatgagcagattccaaattggttatcaatccaaaattcgaaagtgtcagttattgatcataagtcgattatgcctgaggatgcattgccgacatttaattcgagtgcaattgagttgaacattgcaaacattccgggattgtcagagcattttgtttgttttaacgatgatatgtttctaaatcgtcaggtaacgccaatggattttttttcagaagatggtctgccaaaagacagcgctgttcaaaatgcaataatgcctgttgaagattttgatcatatgactgctaataatgtgatgttgataaatcaaaactttaataagtatcaagtcttgagacgtcatccatttcgcttttttaattttcgttatggatttttaaatattttgagtatatgtttactaccttggccacgatttacacgattccaagatccgcatgtgccaatctcttttcgaaagtcagttttcgaaaaagtattaaatcttcacagagatgcgtggaatgagacatcacataatcgatttagaaaccgaaatgataatacaatctggttaattcgttattatcaacttgttacggcacaatttaatcctaggacaccatttgtcgggaaaaagtataatattggagaaatgaaaaaaatagttgatgatattaatactggtaagcataagatgatttgtattaatgatcagaatgttagtatggctgaatttgataatttaacaaagcaactgagaagtacatttagaagcaaattatcacaaaaatcggaatttgaaaaataattattattttgttgaatgtttttgaggaggatgagttgtggcaagatattccagaatttttatgttttccttgaaatatacgattttttgtattgtaatcgtcggtttactacttttgattggatcaatttgtaagagcagacggagtggaacctttaccttctttactttacttgccgtgatttctgcgatacgtgtgaataccggttcagattatttcaattattatataaattacgaaacagtcactaactattataatagattaattgatacgataacttcaaggtatcaatttgggattatctctgtggattatgctgtacaaaagctatttggaaattcaaatggcctctttattgcaattagtgtcgtagtttcggtaatcttatggggaatctttcgttgttattcacaatttcccagaataagtgctagtgtttggttattgagtggcttctatttaatatcaaataatttattgaagcagtatattgcaatgttattcatgatgataggttatttcttcatgcgacgaaggcatttcgtcctattcattttttgtacttttctcgcctcggtatttcatttaacagcattgcttgtagcaccaatgtattttttcagtactcacataccggtaactaaaagaagtcttgttctgtgttgtacgtttggtggtgcgttactagttattgtttatccaataattcgtatactagtaaaagtaagattgttttcgaagtatgaacaatatcttgattctgcagcaacagttggatatcgttttataattgcttctgtgattatgggtgtgttttattttgtaattgtcttggtgtatctaagaagtattgaaagcttgagtgaagatgcacgacaatatattagaatgatcatgattggcttgatattgactatagtgtcggtacgtttcttctatttgtcacgagttgcgtactattttctgcagtttttaccgcttttagttgcaaatgctttcaataagcaaatgaatgatacaactatagcaagaactatgagaagttggattttgatttggttgactatatattgtttcctatttactgcattttctggtgaaaataattattataactattctacaattattaatgatgttccagtatctgttcaagaatttataagtaggtgaaagaatatgtggagtagaacggctagatcggtgcagaatattatttattcagtaattgggcaatcagtcgccttacttttgagttttatattgcgaatagtgtttgttaggactcttagtaatgagtatcttggtgtagatagtttatttaccagtttagtgacagttttatcgctggccgagttaggagttgggtcggcgataaattttagcttatatcaaccgttggctaaaaaaaatgtcaatagaataaaatcattgatgcatctttataaaaaggcgtatacgataattggattggccgttttgattattggattttgcatggttccattcattcaaaacattggtaatgtgaagtcttcagtgcccaatctaaagtttttattctcgttgtttgttgtaaatagctcaatatcttatttttattcttataaaaaatctttaatagttgcggatcaatatagatatattacagttatatacacatatgtctcatttgcattaatgagtattgtgcaggggatagtcctgataatttttaagcagtatatactttatttagttacaatgataatatttacgtttttacagaatctgtttctttctaaaaaggcagataaaatgtatccattcttaaaagatacaaatattgatcctgtagataagatgacaactcgtttaattgttcgaaatgcttatgcaatgagtttacataaaattggcggtgtaatagtcaactctatggacagcgttattatttcggcatttgcaggaatcaaacaggtaggccgatactctaactatttattaattaccaatgctttgaatttagtgtttagtcaaatatttactgccattattgccagtgttggtaacttgggtgctgaggttaatcggaggcataccaatgaagtatttaataccgtcttttttgcggggtactggttagtctcgtttagttcgtgctgtttatttgtattgtttaatccatttattagtatttggattggaaaaggatatgtttttaatacttttgtcgtagctgtaattgtattgaatttttatatttatcagattagacgtccagtacttacatttagagatgctttgggtatttattggtatgatcgttatgttccaattatcgaatcaggtttaaatttagtgatatcaatatttcttgcacgacaaattggcgtgtccggtgctctactcggtacaattattagctcattgttgacgaacgtttggattgagcctctaatgttataccgacatggactcaagtcaaaaacaatacaatattattgtaagcttgctggatattcagttgttgctgtgatacatatcgcagttgtacaactattagtgttgacagtaactgctaaaataagaaatacgattatttcttttgttgtaatgttactagctacaattgttttttttaatgttgtatttgtcgctttcttcttcaaatcacatgattttaaattggtttggaaattgatggccaatatttttattactgtgaagaacaaagttgttaagggatagcacgtgatttgattggtacaagataattataagatggcagaatatcatatagttgtactaaatatggaggaaaaatggtagaacgaatattacattgtgttccaggaaatatggatatggggggaattgagtccctacttatgagtatttatagaaagatagatcgaaataagatacagtttgattttattgttcataaaactgggaaaaatttttttgaagatgaaattttaaaactgggtggtcgtatctacaggttacctaataagcggaagcatccatttaaatataaacaagaatttttaaatgtgataaagaattataaaatcatacatgtgcatagtgtttatgcttttacgtattatgaagtaaaatgggcaagacaatgtcaaaaatctgttatattacattctcataactcggatgctaagcttttaagaaaaataatacattatctattcaagcatttacaaaaccattatgtatcagtacgattatctcctagtaagcaggctgcaaaatggatgtttaacgaagggcacgacaaagtagtttatctttataatggatttgacactactaagtttcagtttgatatgaatagtcgtattgaaataagagaacaacttggattggcaaataatgattatattattggttgtgttggacgattagactggcaaaaggatccgatatatctgcttcgactctttgaaaaactaaaggccaatgataatgcttataagttgatattcatcggggatggttcctacagacaaactttagaacgtgaaactcatcaaaaaggtttagttaacgatattatttttactggaagtgtgtcaaatgtgcctgaatatctgagcgctctggatatatttgtattaccgacccgttatgaggggttaggaatttcgttgattgaggcacagataaatggccttccggtttttacaaataaggatgtcccaaaagaagcggtcattaatcagaatatgtatttgttagataaaggtgatttagaattatgggttgatgcaataaataaggaattaaatgtgatcaatttaaaaaaacggaaagtcaatctgagtgactttaatcaatacaatattgaaactgtcgtaaagaagttacaaaacatttatttacaattgttgtcatagaatgaaaatattaagggtagcgtcaagaatcttgtgtaaatgaaatggtagattgtaaaattaatccgaacgctgttcggacaaaaaagatcagcttcctttaaaatggtgtttaccacaaacccatcttttaggagctgatcttttgtctagtataacctattccgaacgaattaaaattgaaaccttttgtgaactaggactgtccaatatccaaatgggcgttcggctgaaccaatcaccgtcaataatttcttatgaattatctcgatgtcaaccttatcaggctgaattagcacaaacagatgccgaatacaagcgatcacgatgtggtcggaaaactaagctgagcgatgagttaaagcaaaaaattctcaaccatttacgtctaagctggtcaccaggaatgattgctcacgaatttaaactagctactaaatctatttataattggctaaatcaggggagaattggtttctccttgaatgatctacctgaacatggcgtacgccaacggcgtaacgttgaccaacgatccaaatataatcaatctttggggcgattaattgaacagcgtcccatgatgattaatcaacgtaagcgcatcggcgattttgaactagatacagtcgttggtcctcgtgggcatagtaaggcagttttattaactttaatcgatcgcaaatcacggttcctttgggcataccggttaaaagatcggacgacagcgactgttaatgaagcactaactaagttcctaaccacttttaatggtccggtgcacagctttactgtggaccgtggcactgagtttagtgggctagtatcacttgaatcacaatatggtattaagacctattactgccatgcttatacgccagctgaacgtggtagtaatgaacgctttaatcggaatttacgttatttttatcctaaagggactcgttttgagcacattagtgctcaagatttaacgacgacgttactccaaattaaccagcgaccgcttaaaatactcgactggcaaacaccgtatcaggttatgctgacaaatttgtccaaaaattcggattaaatttgcaatctaccaatattattatcgagttttaagtatacaagatttattgttggaaagtagttattgagtacaaatataggatatccatgaagaatgacttcgtaggtatcctatgtttgttaattaaatttagacaatttctagagaagcattaacgcactaaacctcttttgcaccttaaacttaatattattagccgttcgccgtgtgatgtttagatccacggcgatttcttttaggctggcgttgtagaagtagcggaggactaagaagcgtttttcgcgtggtgtacagacttgatagaggcgttcgaagaggtcgttacagatggcggcgtcttctgggttacagtatggatctgcgacttggtcgaggtagtccatcacggaatcatcatcgtttgtacggttaacgaagccgattcgcttgtcatggttattatccttgcggaaggtcatcataatcgcccatttaacggcctgatacgcgtaaaccatgaagcggtgggtttcgacttcaatattgcctgggaaatgatcgtaggcttcgacaaaggcaagcacgccaatttggtagagatcagcaaagttattgcgctgccgtggaacgtggagatctttgagaacgccatagataagtgtgtcgtcttgtataataaaatcaaaagcagtttgtaaatctgattgggtcattgtaaagcatcctgtctactatgagctcacagtgtgaattaccggtaagttcactatagcgggtttgcataaagaagggtaatcgccgattttagcggtaaatcaatctgtttcagctttaatttgcgcaaatgcattgaaatacaaatgaaaattattgtaaatagcgacttcgggttaatttataattggcgtaatttttgaattagtgctttaacacttttgatatagcactgaatgtcaaatacgctgaattcggggtattcatggattacggcttggtaaatgaaattttccttatgcattttaagtgcgttgagtaatccgagtagttcagtagctgttttcggaatattcgagcacagatggcaatggcaatcatcgaagcgatggacgatgcttggcttgaaacaagtcttgagcttgatttgatagccgaaattagtggcacacacagtgagacagccaagttggactttgccaatggctgcacattgatgaatttcagtatcgatttgacggcctttataagggaggatacaggtacagtcatttagcaatgtaacgtagagatggttatcgctaacttcgtaatcacggacgtagtggagcgctaaccacggtgcgttttgatgagccgtgccacttaatggtaaatactgatattcgccattgatgtgtggaatcttacgataccaattgaaacaatggcaaaggtaccggggttgtgagaagtccatgatctgatggcgattataagcgcgcattagttgccgggtagaacgcggactaatctggagaccggttatgcggtctaacacaagactttgcgattttttatagggaataatcaccattgtgtcactcgtaatactagtttggtaagaacggggaattgacgattgatccagctcacagaagttataatcaataccacgtttgatgatgagtggcacgggaagacattcatgggatgtattgacatgtttgggatgtagtagaaacatcgaagacctcctttattgttaacatcttgagaataccaatgatgggaatcgcttacaaaacaattgtgaaaagattgataaaatcctaagtgcttgttaatcttttcctcattttcggcatataattggtgcaaatccacttttttatggcatactgttattagactataagttatgggggattttagtagatgaaagtacgtaaagcagttattccagcagccggactaggcactcgttttctaccagctaccaaagcgatggcgaaggaaatgttgccaattgttgataaaccaacgattcaatttatcgtggaagaagcgaaggcttcagggattgaagatatcttaattatcactggtaagggcaaacgcccaattgaagatcactttgattcagcaccagagttggaacaaaacttgaaagccaagaataagaccgctatgttgaagatggtcaacgaaacgactgatatgggggttaacttgtacttcattcgccaatcacatccaaacggattaggggatgcagtgcgccttgcaaaatcattcgttgctgacgaaccttttgtcgttatgttaggtgatgacttgatggaagataaggtgccattgagtaaacaactaatcaatgaatatgaagaaacacatgcatcacaattagccgttatgaaggtgccacataatgaagtggacaaatacggcgtgattaacccagaaaacaaagttaaagatgatttatacaacgttaagaacttcgttgaaaaaccagctgttgataaggcgcctagtgatttagcaatcattggtcgttacctgttaacgcctgaaatttttgatattttagaaaaccaaaaaccagggcttggtggtgaaattcaattaaccgatgcgatcgatgaattgaacaagacccaacgcgtcttcgctcacgaattcaaaggccgtcgtcacgatgttgggaacaagttcggttacctagaaacaagtatcgaatatgggttaaaacacccagaagtgaaagatgacttgaagaaatacattatcgacttggcagaagaattaaaaaaagacactaaaaaagaaaataaataacctgtaaaaaacgttcaaccactccgtacattggagtggttgaacgttttttgttgttttaaatgataagcccttcgcagtgatccacctcatgttgaataatctgtgcaatccagcctgagaaagcctgcttgtgcggtttgaaggcttggtcttggtaagtgacctcaattgtttcataacgcgttgtagggcgttctccgtttaatgagaggcagccttcagtcgtttgataaggtttggcttggcgcacaatctgtggattcacaagaatcacaggtaagacgcccatttgaacgatgataatccgtttattgatgccaatcatgttggcagccattccgacgcaacgttctgtgttggcttgtaaagtatcacgtaaatcggtcagcacatcggtatcagctggtgttgctggaactgctttttgagctaagaattgcgtgtcacgcataatgggtttaatcatagtagactccttgagtagtagttcttccattatagcagaaaataaactcattcaattctcatttagtgaaagtccgccttatctgcgggcttttttaatgcgattatttagggattagagtctgcttttcaatattgtggtaaaaaattcgacaaatttggattttatgcttataattattaacatactattataaaacgtctaatctaatcttaataacgcgttaagagcgatgagagaagttggtcaggcattaggggaggatcacatgaagaaattactcgtatttttaggcagctgtttactcgtaggcttatttgtatttgggagtcaagtgaataatcaggttcaagccgctgaaaaaacttatgaaatcggtacggatgtgacctatccaccattcgagtttgcgaatgagaagaatcaatatgtcggtattgatattgatatcatgaaggcagttgcgaagtccgagggctttaaagtgaatattaaaccgttaggattcaacgcagcggttcaagccgttcagtcggaacaaattgacggcgtgattgccgggatgacaattacacctgaacggcaagcaaaattcgatttcgctgatccttactacaagaccggggttgtaatggccgttcaaaaggacagtaagattaaaggcttagaagggttgcgcggtaaacgtgttgcgattaaaacagggacttccgctggggcctatgcgacggccaaagcgaaagaatatggctttaccaccgttacgtttgatgattcagataatatgtataatgatgttgtgaatggtaattcggcagcctgttttgaagacgagcccgttatgcaatatgggattaagacgggcttgaaactcaagattgtcaccaaacctgctcaaggtggcgaatatggatttgccgttaagaaagggagcaatcctgaactcatcgctaaattcaataaaggtcttgctaaattaaaagcaaatggtcaatacgacaaaattaaagcaaaatatttaagtacagaatcaactaaaaaagcaaccgttgatcacagcttttttggattattgaaagaaaataaagatgcgttgttgagcggtttaggccagacgttattattaacagtcattgcgattttcttcgcaacgattttcggggttttcttcggattactcggcgtattacctaaccggtttgcgcgtggcgtttcagatacggtcatctatattttccgtgggttacccctcttggtgcttgcattattcatctatactgggattccaagtttaactgggcagaagattccagcgattgtggctggggtcatcacgctgatgttcaatgaaggggcttatactgcagcctttgtcaaagggggcattggcgcggttagcaccggacaaatggaagcagcgcggagtttagggttaccatatggtaaagcaatgcggcgcgttgtgttaccacaagggatccgcattatgattccatccttcattaaccaattcatcatcacattgaaagatacgtcaattttatcaatcatcgggattctcgaattgacacagacgggtaaaattatcatcgcccgcaaccttgaagggttcaaaatctgggcaatgattgccttaatctatctgatcgttatcacgttactcacgtggttatcgaagtacattgaggggagaatagataactaatgaatagaattgaagtgtctcatcttattaagaattacggcagtaacgaagtgttaaaagatttggacttaacggtcggtgataatgaagtggttgtcatgatcggcccctcaggttcaggaaagagcacgttcttgcgctgcttgaatcgcttagaagaacccacgagtggtgagattatcgttgatgggtacaacctcagtgatcctaagagtgatttgaatcaaattcgcgaaaaaatcgggatggtattccaacactttaatcttttcaaaaatctaacggtcgctgaaaatattacactcgcaccagtggaactcggtaaaatgacgccggcagaagcaaaagaaaccgccaagaaactacttgaaacggttggtttatcagagaaattcgatgcaaaaccacaatcgctatcaggtggtcaaaaacaacgggtcgccattgcgcgtgccttagcgatgaaacctgatattctcttgttcgacgaaccaacatcagcgctcgatcctgaaatggtcggcgacgtgttggccgttatgaagcggttagccaaagaagggatgacgatggttgtcgtgactcacgaaatgggctttgccaaagaagtggccgaccgcgtcatcttcatggcagatggacacattgtcgaacaaggcacaccacaggaaatctttgacaccccacaaaacgaaagaacaaaagacttcctgaacaaggtactaaatgcatagcgtgcgtttcaaaaagcacgtttaacgccaaccaaaaaagcggcccaccattacttggtgagccgcttttacgattcttaggtctttagaatgttagaatagaaataggaactagtagagaaaagagggattacgatgcgattaggcttaaaagcagggattaacgatcagcaaattgctgatcgaatgcagtatcagccaacgtattttgaatttcatttaacagccgaagatgtcacgccaaatgggctagtacgcttacgcgaaaaaattcgttatgtacgcagtcagcaggttgaacggattattttacaccacccaatgagtttcgaagggcatcatattgaactgtcgatgaatgaagcaagttcgccagcccgataccgctttttatggcaatcaacacttgatttattgcagttagcgaaagctgaagatgtccaactattggtgcatggctcttatgatgatccaattgaagaattgacgacgggttacggtaatattacggatgccattcgtgttttgttcaagcgtctcgattatttacagcggattggcggacaaaatattatgttcgaaaattcaatttcaccgattttctattatggcaatccgatttttgatcaggccatctttgataaaggttaccgcttagcgtttgatacgagtcactgttttatcaagttgcagggtgatcagaatgctttcttgcagagtctggcaactttgcgtgagcacgtcgttcattatcatctggttgattcgatgggtttgaagcatgatgggttgcaattagggactggcaaaattgactgggcccgcgtattgccattgttaaatcctgatgctagttcgatctatgagattcaattagccgatcaaaatgatgcacgagaaatgattgcgagtcatcgttatttaacgcaacttgaacaaacattatccgagtagaattttgtcagcagcaacgcgaaaaccaaacaaaggatagtcccccgtctttgtttggacatacatataatgttggtagtagtttttttgatttaataataggctaaattcccactgcttcagcggctttttgtctgcggcctttaactgcagcaatagtcgtggctgttcgtcaacgacggcgagctcaaagtgggcgataggttcgagctcttcagggccttcgaagtagatgccatcgtttttgggtgtatcagctaatagctgtagtaagtcaatgacgcgcatgataagtcgtcctttctaatagtgcgaaaatcccggcaatgatcagccaacaaacacccgacaagctaacggcgatggttaggataattgccattggtgttagaacaccaatgagccaagtcgtggtgttgactgttggcacaaatgaaaacagaccagtaacgaggcagaccgcgatgactgtggcaataatccctggaatcgtacctttaaaatcagctgcggataagtcataaccaccgatggcaatcatgctagttaagattaaccagagcaagagagcacccggttgcgtcgtccagagctggctgaataagggaccgatggcgtttaactgccaagtgggatgttcagcaaaggtcatccacgttgcaaaagtgggccgtgctaataaccaagtcagtccgaaaatggcggctgaacaaccaaaaatcggggcaatcccaatccagagattaccaattgttggccaaagacggccggaatggtatcggtgattgacatggccaagcgagtgatcggggttatcccgtaaatttaattttaagagttgcatatcgataatttggtgttggaagattaaacaggcaacagcatggctgagttcatgaatcacagtgcctaggccgccaattaaaagttgtgagtaatcccaccaatgggctaagcgccgtttagttgaacgattgattagtgttaaaatcccggcaaaagctagtggcagcgcaattaccagtaaacaattaagcaacattgattgcaatatttgcgataagttaaatggattgggcatgataactcctttgaacgactttatgtaagcctacaccaaagtttatcgcggaaacaagggttgttaatcaatttatgtaaaacgcaaaaaaagcccccaaatcagattcgatttgggggctgtatgctgcttaattatttgtcagaaaagattggtgtttcaatctgttcaacgtatttggcaccaactggttctttgtagagttcaatcccttttttgataaacatattggctgctgcgattttagtcatcgcacttctaactgtttcggcgtctaagttgtcatcaatattgtttaagcgcaatacacgactcttagcatcactgtttttaaattctaagcaaagttgtttcatcttgaattcctcctcaaagattggtatgttttttatttagcgatataagcggatttagtggttagagtagctgttgcaaatgtgtcacctgcgtggagacttgcgagggcttcaccaactgcttggatttccgtggcttgaacgtcttcttttacggcggtcatacgacgttgtaaactttcatttggatagtctgtattttgtaattcaaaagcgatcgatgttgctaaccatgatgtttgcatgtggattcctcctaaagattagttgtaagcgtcaccggtgaatgacttacgctaatgagtaatgcacgatgccgataaaatggtaaaataatctcagcttaccaagcggatttctaaaaaaaagttaaagaaattgtgaattaccagacgtttcatgaaaatttagttatagtaataattagacttatagatgaagagggatattatgcaagaagtggttattatcagtgcaaagcggacaccgattggtaaattggggggccaacttgcaagtttaagcgcggttgaattggggacagttgctgctaaagcggcgattgaagcagccgggattgatccaactcagattgatcaagcaattttcgggaatgtcttacaagccggttctgggcaaaacgttgcacggcaaatcgctttgaagagtgggatgacacaatcaagcacagcaatgacagttaatgaagtttgtggctccggcttaaaagcaattcggttggcgcagagtgcaatcgtcatgggcgatgctgacatcgtcttagttggcggtacagaaagtatgtcacaagcgccttatttgaataaacaaatgcgttttgggagtaaatttggggaccaaacaatgattgatagcatcagtagcgaagggttaaacgatgcgtttacgcaccagccaatggggattacaggcgaaaatgtagcagctaaatacggcattacgcgtgaaatgcaagacgcttttgcactcgcttctcatcaaaaagccgcgcaagcgacccaagctggttggtttaatgaagaaattgtgcctgtaacggtgcaacaacgcaaagcaacgcttgaagtgcaacaagatgaaggtatccgcccaacgacaaccatcgaagcaatggcgaagttgcgcccagcttttcaacaagatgggactgtaacgcctgccaatgcttccggcattaacgatggcgcctctgccatgatcgttatgagcaaggaaaaagctgctgcactcggattagtttaccaagccactttggtcggctatcaagaagtcggtgctgatccagattacatggggtacacgccggtcgatgcaattcaaaaattattagcgcaacaaaatcaaacattatccgatatcgatttattggaaattaacgaagcgtttgccgcttcaagtgtggccgttcaaaatgggttacaagtcgatcctgctaaagttaatgtggccggtggcgctattgcgttgggccatccaatcggtgcttcaggtacgcgcatcatgacaacgttaatgcaccaattgaaacggacgcaccaaacaacagggattgcttcgttatgtattggtggcgggttaggaattgcttttgaaattcaattaaatgaggcatggtgtaatgaaaaagcctaagttctatcaattaacgaaggatgaacgtttagcaacgcttgttgaacaaggtcacctaagtcagacggatgctgattgtttagcagctgcagaacccttgtcagatgagatcgctggtaatatgattgaaaaccaaattggccagtaccaagtaccgcttggtgtggtgcaagatttattagtcaatcagcaagtctatcaagtcccgtttgcgatcgaagaaccatccgttatcgcggcggctaataatgcggctaagatggcacgagctaatggcggctttgtgactgaacaactgacgcggctgatgactggtgaagtcgtgttagagaagctagttgacttagtagcggctaaagcttggattagtggcaacaatgaccatttatttgaagttgcgcgggctgcgcatccatcaattgttaaacgcggtggtggtcttcaaaaaatcacgccgacgattattgacaaccgctttttgaaacttgaattgcaaattgataccaaagaagcgatgggtgccaacattgtgaacacaatctgtgaagcgatcgcacatgctgtgcaagaacagttgggcggcacccttttattgagtgttttgaccaatgccgcgtttgaatccgtggtgaccgcaagtgtgacgattgatccagctaccttaacaactgcgacgcttgctggcgaaacaattgccgaaaagatgattgcggcgagtgactttgccaaagtggatgtggcgcgcgcagcaacccacaataaagggattatgaacggcatcgatgcagtggtgttagcgacgggcaacgattggcgcgcaattgaagccggcgtgcatagttatgctgctagaaagggtgcttaccaaccgctttcgagttgggaatggacaactgatcagcaactacgcggtcgaatcgaactgccactgccagttgggatggttggcggatcgattggtattctaccaaccgtgcagattaatcagcgcttgttaaaagttcagaatgcgcgtgaattagccggcattatcgcagctgttggcttagcacaaaattttgccgcgctcaaagcacttgtgtcagacgggattcaaaaaggacacatggcgcttcaagcgaagtcgttggcgattgccgctggcgcaaccgagactgaattaacgcaattattaccattattattgaaagcgacacatttaaatacagcaacagccaccgagctgttagcgcaactgcgtgctgaaaacaaatagattggaagattattatgcaaatcggaattgataagatgggcctttttacgcctaatacctacttagatttagtgatgctagctaacgcgcgaggcgttgatcctgacaaatacacaattggaattggtcaagatcaaatggcaattgcccccctcagtcaagacagtgtcacaatggcggctaacgcggctcttgaagtgttggatgatgataatcgtgattcaattggtttattaattttaggcactgaatcaggaatcgatcagtcaaaagccggtgccctttatgtgcaacgcttattaggattaaaaaatgcccgtgcttttgaaattaaagaagcttgttacggggcaaccgctggtttgatgaccgcttatgactttgtagcggcgcatccagagcaaaaagcattagtcatcggttccgatatcgcccgttatgggcttgatacaccaggtgaagtgacacaaggtgctggcgcggttgcaatgatcgttagtgcagcaccacgtttgttggcgttagaaccggcaacggccatccacagtgatgacattcaagatttctggcgccccaactactcaaaagaagcttttgcgcgtggcaaatattcaactgaacaatacatcgaatttttccaagcaacttgggcagactatcgcgctcaaactggccgcacaatttcagatttcaaagccttaacgttccatttaccatacacaaagatgggtttgaaggcattgcggacaatcctgccagaagcaacggaagcagaacaagcacatttattagaccgttatcaagaaagtacattgtatagccgtcaaattggtaatatctacaccggtgcgttatacctaggcttcctttcattattggaacaatcaacgcaattggcagccggcgatcgaattggtttattcagttacggttcaggtgcgatcagtgaattcttcaccggtattttgcaacccggatttgaaaaacaattagccggtgcggaccacaaagcaatgcttgctgcacgacgtcaattgacgatggctgaatacgagaatcaattccaagcagaactaccagaagacggtagcgaatatgaaattgatttggcaatggacaacgcgccaatcattttaaaaggtgttaaggaacacgaacgcaattatcaagttagagattaataaaaaaacagctatgtatcctaaaaactaccattaacagtattattaatggcagtttttttagctatttctgataaaataacaagtcagaaatgatggaaaaacttttttaaatttaagagcattttgattgtatccggttacagaaggtgctatattaatggtgaggaaagatagcttggcaagtgaaaccaagttagctttaaatagatttaccactttaaaacacaagcaccagatttgaatgtacgacacatcaagatttaaagtacgaaaaagaaattgcaaggcgtggttccaatggaaacataagtgtaactcttcgtagtattaagatctaagtatatcggaggctgatgtctgttaaagaatatcgctcaagtagtaaacacgaatttaatcgtcatcgctaaaactgcacatgcgggtcaaagatagacgaccaaactagatcgagtgaaacgattagcagtgggctagaccaacgattaaaaacaattgaatagaagtatgaggtgtaacattatccagaatgtaaaacagaatcagctcgtaacaaccaagctatcaacctcaacctaggggattcaagcatatcaaagcttgaatccttttttttatgctcaaaatacaatataaatagccattcattatagataacaaatgaatggctttatttttaattaggcgtgggcttgcactgcctcaatcaacgcgtctacatcattcacaatcgtgccgttttgtttaattaagccggttgtgtaaaggtttaagtaatggaattggttttcggcgatctcttgcaaagccgctagtttttgtggatttgtagcaccttgttggcggctgtcggtgtataatccgatcattggaatttggcgaccgtatgccacaccgatttcactagcaacgccaacatcgatggtgggaccatccaaaacagcaatgacgagatcgctagcaacgagttcgtctgtatcggcttgtgcgatcatttcagagctggcataagcattcttgtcattaattgcggcgttttcttgtgggagatagatatcgacaccaggaatcgattggcgcagttgagcaacaaccttagcgttataatcaaagtctgctgctgagaatagagcgtttgcgaaataaattttcataagaattcctccaagttgattttctttattgtatcaaattagtggtgaaatgcggtacaattaagttaatcagttttggaaggggattcacaatgcgcgagattcaagaaacaccagggcaagtaacgtttaagtcagcttggcgagattattttaaaggttattttgattttacggggcgaacaacacgtgcgggttattggtgggcgatgttgattttaatgattgtttggttcatgccatttttcgctttgctatttgcacaagctgcaaaggtgcaactgaagatgagcggtgcattagtgctgtacataatcgttatcggattgcttggagtactcacgtttattccaacgttggcgcttagtgtacggcgttatcgggatgctgggttaaatggtcgcggagcagttgtattgtggttattgaacgggtttgcatcccgttttacatcgggcaatcaggggcgcgcatggacgttaatttcggcgttgatcggaagaaagtggttgtgaaagcacgtttcaaaaagagtgcgtcacaaccgaaacggtctgagcattaaaaaatgagagtgtggcataagtcgggtatatcctgaggattaacacagaatggtgaaggattgcttcaagcaatcgtttgccattcagggttaaccggaaggatatgacttatagaacacgtttaggcgattaaagtccaaataaaaaagcggtccatcaacaaacacatgttgatggaccgcttttttgcgttatagatcgcgttttagtgttaatgtcacgactgcttcaactcgtgccgtttgggggaacatgtccaatggttggattttttccacttggtacgtatgcacaagggcttttaaatcccgtgcaagggttgatggattacatgagacgtagacaaatttcaatggccgactgtctaaaatggcatcaattaatttttgatctaagccagtgcgtggtgggtcaaccaccaaggcggttgggacgaagccattatccaaccattctgggaggaggtcttcggcagcccctacggcatattcaacgttttgaatgtcattgatggcggcgttgtgtttagccgcttcaattgaatcggcaatcgtgtccatgccgcgtacttctgcgacttgattggcaagactcaagccaattgtacccaccccacaataagcatcgacgaggcgatcttcaggtgtgagatcaagtgcatcttgaactaagttatacatcttagccgtttgaactggattcaattggaaaaaggcgcgggcagtcaattcgaagtgaacgccgtttaaagtttccataatcgtttcttgaccagccagatgaatcgtttggtcgccccaaacgagcacgtttttccctttgttgatattttgcatgattgaaaccacttcgggcaattcagcttggatggctgtaatcaatgcgtgtttttgcggtagtttaggggagttggtaatgaaggtcagttgcgcttcaccggttgaaaaagattcgcgaacgaccaatgtttttaaaatcccagcattcttagtttcatcaaagacgggaattccgagtgattcgactaatttcaagacggttcggatgattttcattgttaaatcggtttgggttgcgaattcaggcaaatcaattaaagtatggctacttggagcgtataagccagctgctaaatgatcatcgatttcgcggacttggaattgtgctttgttgcgataatgccaggggttttccattccgactgtatcggtaatattgtatttggcgtagccttgtggtttgaatttttcaagcgcttggacgacgacgtcttttttgaaggcaagttggccaggatagcttaagtgttcaagctcaatcccaccgacttggccgtaagtggcatccttaggggtaacccgttgtggtgaagcttggcgaagtttgtggacttttgcttcaatgaaacgaggggcaacgttggtgacttctgcgacaaccacttcttcaggaagtgcgcctggaataaagacaattttgcgtttgtaatagccaatcccttcaccattgatgccgattcgtttaatcgtcaatggaaaacgttggccgacttcgacttggtttgtttgttctggcatttaatccgctcctattaatataaaataatgatactcgtttttctcattgcattcagtataacagacttagcactgaaaaatcgcttcaatagtgggaattaagcagtgacttttgtccgggtgcgccatttatgctatgctacaggaagtcaaagtaaggagcgaaaccatatgaatttttgggaacgaaatcaatttttaatcgccatgctgattgtactcggaattggcgtttatgccttccaacacaagagcttaccactgatcgtcgggactttagtgctcgccgtcgtggtcattggatttaaagtctatttaaacatcaaagcaacacgtaacaagggagaataacatgccgaagattaccaaaataacggcacagaaaaaatcaggccgctataatatttttatcgatgagcaattcgctttcggcgtgaccgagagtgtcttgattaaataccgtttagcgaaggatttagagattgatagtcaactgcaacgcgacattcaaaaagacgatgataatgccaaagcgtatcaattggcgctcaattatctgagtcaccaattgcggacggaaaaggaactaacgcaatatttacgcgaacacgagatcactccagaagggatccagactagcttggcaaaactacgcgagttacattatatcgacgatcaggattacgccgatagctacgttcgtactgtgattaataccgctgataagggccccaaagtggtccgccagaaattaatccaaaaaggtgttagtgctgcccatatcgatcaagcacttagtcattattcagtggatgatcaagttgcggttgggttagcagctgctaagaagttggcgaagaaataccgtcatagttcattctttgaacagcagcaaaaagtcaaacaaggtttaatgcaaaaagggtttggcggtgacagccttagtttaattattgaagcgttggcccttgaagccgatgaagatagtgaagctgacgcgcttgctgaacttggtgcaaaaaaatggcgccgttatcgattactcgaaccacgagaacgccggatgaagatgcaacaagcgttgtatcggaaaggatttaatattgatgcaatcaaccacttcatcgacgaacaagaactatcagatgacaccgagtgaacgggacgcgtttcaaaccgcgtttatgacttggtatgatgaaaatcgccgggacttgccttggcgtcagaatcaagagccctatcgtgtctggctatctgaaatcatgctccagcaaacgcaggttcaaacagtgattccgtactatgaacggtttttggcgacttttccaacggtggcagacttagcggccgctccagaggacttattaatgaaaacgtgggagggacttggttattattcgcgcgcgcgtaacttacaaaaagcagcgcgccaagtcgtcgacgactacaatggccagtggccaacaaccgcggctgaattagaaaagttagccgggattggaccgtacacagcgggcgctatcgccagtatttgttttggcgaagttgtcccagcaatcgatggcaatgcttttcgggtgttcagtcggttattgaaaatcgatgctgatattgccaatccaaagaaccgccacattttttacgatgcgattttaccgctgattcccaaagatcgcccaggtgactttaaccaagccgtgatggattttggttcgcaagtttgtacggcaaagaatccaacggttggtgagacggcgttagcaccgtttttccggagttatcaagatggcaccttattggattatccagtcaagacgaagaaagcaaaacaaaaaccggttgcgatgtttgcagttgtgattcgctcgcaaaagggcttattatttcaaaaacgaccgagtaccggtttattagcgaacctgtccacttatccactagtcgctgcggaagacttgcaagcaaccgacgatgaattattgacaccggaagaacaattagctcgtatcgaaacttattttaaagaggcttttgcgctagaattgcagcaattacatgaatcaggtttaaaacccgtggtgcacgtttttacgcatcttaaatggacgattacccttttagaagcacaacttgcagcagatgccgacctcgcctttttcccaggccaatggtataccgaggcacaattagctgacgttgcattaccgactgtgcaaaagaagttagcggcacgtttggcaaccaattaatggtagaaagttttaggtaaatttgcgagtctttgctataatgataggtgattatgaataataaccttggaaagctgggtatgtcgatgagtattcccaaagaaggcgactatatagcgattcaaagttataaacacgatgggagtttacaccgcacttggcgcgatacgatggttttgaaaaccagcgagaacgcagtcattggttgtaacgatcataccttagttacagagtcagacggcagaaagtgggtcacgcgggagccggcacttatttatttccataagaagtattggtttaacgtggtggcaatgattcgtgagggcggcgtttcttattattgtaatttggcatcgccgcatgtcatggatcaagaggcgcttaagtatatcgattatgatttagatgtgaaggttttccccaatggcgaaaaacggcttctagatgtcgatgaatatgaagcgcacagtgcgcaatggcattattccgccgaaactgatcggattttaaaagccaacgttaaggttttggttgattggatcaacaatggcaaagggcccttttcgaaggaatacattgatatttggtataaccggtatcaagaattggcgcaccgtcgttagaacactatttagtctcaagcaaaaaagccccagtcattgattgactggggcttttttgtatgggttaatcgttttcgactgaagtatcttgttgaatcgttaatgttttaaagccgatgccagcaccgatgctgatggatagcaaaagcgcgaagacgcaccagccgagtaaactaccagcaatgatgttgagtggcaagaagtggcgtaatagataagttgcaaggcagaaaaggatgccatcaaaaatgaagttagcaatcttaataccaagtgaacgttctactaggaagaaacttgttaccattttaagtgtttggttaggggctaagtcagccataatcgtcaacggtcgttcgattggaactttaataaataacattagggtgctgctgattagagcactgaacaaggtgcgatcccaagtggcactgtgaatcacaagactgtcgtaagccgttgcggcaatcgtaatgacgagtagataagggataatgaagaaaaataagtggacaagaagtgatttttgcttaggcatggtaacgtcctttctgttattaagctgtgttcattataagtcatttagtggtgaaatgacaattagtcagttaattttttaaccatttcttgatgcataatcccggcatctaggaactgtggtttggcggttgcttgaaaattaagttgcgtatagaacggtactgcacttaattgagcatttaaagtgagcgttgctttgcctgattcacgagcaaaaacttcagcggcacgcatcagttcttgaccataaccatgatgccgtgctgaacggctaactgcgacacgttgaacatgataatctgagtccgcttcgatgagccgcaacgtcacaacggcttgatcagcaacgtagccgacaaaataaatcgcttggtcttcgaattcatcaatctcaagttcagcaggcacgtgttgttcaacaatgaatacggcttgccgaattgccaaactatcttgataaaccgtactttttaaatcacgagtttgtttcactaacataaaaaaaccacctcttcaaaaggaataatcaatgtgtatcactataaaatttggtacaataacaataatcgttacactatgatagcataaaatgcgttttgtgtgacacaggcacactggagggatactgcatgtttgatcgtttacgccaatcaaaactattattttggtcaattgagcttttgattttggctgtgttaatctttgtttgcaccaaaattagcttcttatttgatccaattggcacctttatttcaactttatttgggccaattattggcgcgggattattattttacctgtttaacccgctaatcaatctgttaggtaaactcaaaatatcacgcaactgggcgattacgattatcttcatcgtcttttttggcggtttaattttcattgtagccactgtgattcctaacttgattaaacaaatcacacagcttgtgacgaacctaccagattttgctcatcgactgcaaaaagtagcggatgatttatctagcaatccgcgcttgaaaaacattgacttcaataaatacgtcaatcagttagatttaaaaccatcgaagattgctgaaaaagttatgaagagtttcacatctagttttggtagtatgattggtgcgattacgagcgttacagttagtgtcttcacgattccaattatgttgttctatatgttaaaagacggacaccgtttagtgcctaatattcaaaagatgttacctgatcgttataacgaccaagtggcggacttgcttcggaaaatgggggcgacgatttcagcttatatcggtggtcaagctctagagtgtttattcgttggcgtctttacatttatcggttatctcattatcgggatgccatacgcttatttgttaggatttattgctggcgtttctaacgtaattccatacttagggccttatattgggattgcgcccgcgttgattatcagtttatcaatttcgattcccaaaacaatcatggtgattgttgtcgtcattgttgttcaacaaatcgatgggaacttgatttatcctaacgtgattggccgttcattagatattcatccgctaaccatcatcattatcttattggtcgctgggaatatttatgggattttaggcatgattttagcgattccgttttatgctgttaccaagacagtgattacttatttatatgatattcaagcgttacggactaaagctaaaaaagggaccgacctttaaaagatgcaggttgaatttccatttttgactatgctatactgcaaggtaggccatattcggctaaatgtacttatttagataatgaaaggtagtggatgtgacgatgaatcctgaccctggaagttcggtgtggggacagttactgttgatattaattttgaccttagtgaatgctttttttgctgcggcagaaattgcacttgtgtcactaagtcgtgtgaagatggaggagcaagccaataaaggtgacaagaaggcgcgagtattagttcaagtcttaggtcattccaatcagtttttagcaacaattcaagttgcgattacgtttgcgggcttcttatcttcagcgagtgctgccacaaccattgcgggtagattagcaccccttttaggaaatgcggcttggacaaaggaagcggccgtattaattgtgacgattgtcttatcctatgtatccctggtttttggggaattatatcctaagcaagttgcactgcatcgtgcagaagcaattgctaaaataacggtgcaacccgtgcggatcgtcggtatcttactgcgaccattcgtgtggttgctatcaatgtcgacctcgctcttaatgaagttgacaccaattgatttttcagaaacagaaccgaagctcacccgagaagaaatggtccacatgattgaatctgggaagagtgccggtgttctggaaaccgatgaatacgaaatgttagaggggattattaccctcaataagaagatggcgcgcgaagtcatggtaccgcggactgatgcatttatgattgatatttgtgcagacaacgatcaaaacatcgatgccatcttagcccaaccattctcccgcattccggtttatcgggatgataaggatcaagtggtgggggtcgtgcatatcaagaatctcttgaaagaagcacgccaaaaaggttttcaggccatgcaaatcgaagcggtaatgaaagaacctctttttgttcccgaaacgattacaattgatgatttattatttgaaatgaaacgcacacagcaacaaatggcaattctgttggatgaatacggtggcgttgttggcttagccacgattgaagatttattggaagaaattgttggtgaaatcgatgatgaatctgataaagctgaagaattgtaccaaaaaattgatgcgcagcattacaccgttatgggaagtatgccaatcaatgaatttaacagtgccttcaatacagatattcaagtcactgatgtggatacaattgccgggttcgtgattactgaaattggtgccattccagtcagtggtcatccggaaacaattgagctgccaggtggcatgagcttaacgacggggtcggtttccggttcacggttgattgatttacaattaacgttaccagaaccagagaccgatgcaccagaagaagtcgactaaattaaatgagcacaatcaatgggacaaagggtgacgcaatggttgcgcaattctttgtcccaagcgcattatattggaataacggaaaggattttataatgacacctactgaattaaaaacggcggttgatcgtcgtcgtacttttgcaattatttctcatccggatgctggtaaaacaacgattacggaacaactcttacttttcgggggcgtgattcgtcaagccggaacagttaaagggaaaaagagtggccaatttgccaagtccgattggatggaaattgaaaagcaacgtgggatttccgttaccagttctgtgatgcaatttgattatgacgacaagcggattaatattttggatacaccgggacatgaagatttctcagaagatacgtatcggactttgatggctgttgatgcggcggtcatggtcattgattctgctaaagggattgaaccacagaccaagaaattattcaaagtctgcaaaatgcgggggattccgattttcaccttcatgaataagttggatcgcgatggtcgtgaaccacttgatttgattgctgaattggaagaactattggacatcgaaggctgtgctatgaactggccaatcgggatgggaaaagacctccgtggcctttatgatatcgccaaccgtcgaatcgaactttatcgaccagaagacgaagccaacccttatttggcccttgatgaagcaggtcggattgccggtgataatccattgaaagaagattctgtttacacacaagcccttgatgatatcgaattgatcggtgaagcaggcaatgcctatgatgctgataagattgcaacgggtgaacaaacaccaatcttctttggctctgctttgactaactttggggttaagacgttcttagaatcattcgttaacttagcgcctgccccagaagcacacaaaacacaagaagaaacgttggttgaaccaacctctcctgatttctcagggttcatcttcaagattcaagccaatatgaatccagctcatcgtgaccggattgcgttcgtacgaatttgttcgggtgaattccaacgcggaattgatgtcacattgacgcgaacaggcaagaagatgcggttgaacaattcaactgaattcatggccgacacacgggaacaagtgacaagcgctgttgctggcgatattgttggattatatgataccgggaatttccaaattggggatacgattcatacgggtaaagaggctgtttcatttgagaaactccctcaatttacccctgaattattcatgcgcgtcactgccaagaacgtgatgaaacaaaagtccttccataaagggattcaacagttggttcaagaaggggcgattcagttgtataagacttacacaactggcgattatatcttaggcgccgttggtcaattacaatttgaagtgttccaatatcggatgcaacacgaatataattctgaagtattgatggatccaatcggttcaagaactgcgcggtggatcaatccagaacaattggatgaacggatgtcatcctcacgaaatctattggtaaaagatattcacgatgaaccattattcttatttgaaaatcaatttgcagaacgttggttccaagataagtatccagacgttgaattaaccgcaaaactataatataaagagtcaaacaaaaataagccgccgattcagacacactaactgttgtctgaatcggcggcttatttttttaggggggtatttagtcaaaagttaggaggccttccattaaccattgacctgttttaagttgacaccagcgactttgattatcgagtacaacgacttgcttaacgactacccgtgttttaggcactatctgatatgttgtgggttggtcatacggtgcttgccaaaatgttacggtattgttgttcagacttgcactgaggtttagaggggttgtttcgataactgcgtaatggtaggtgaactttggtacttggtatgattcatcactgcctttaggattagtggcatgtaattgataacgcgtaggggtaatccaagaactgccaagattgaaccattgtttgccagatggagcagttgcacagctataaatcttccaaaccgcgtgctttggcaagcgagcagcagtcagcgcttcttcacttggttgctgataggtatccgttggctcaagaagttcgatgaagggctgttcaggtgcatcgctgtgttttaaattcagcggatcatatttaaaatggacaaactgtgtcttagttgtaaagcgaccagtctgattagctgaggtgtggtgcacgaagttagcaccaccttctagtggattggcttgatagtgttcgttcaaagcacctgataaaaattggggcttaatcaacaagccaccttctaaattctggtgtaacaccattactggtgctgcgagttgcggtttataaaaaagccagatagtggtgttttcttcaggaaactgttgttttaaattggtaatagctgccaagtaataaccggcaaattttagccatggcaaattgagcacggtacccacttcacctgtcagggtcatcgttggtcgtaaagggacccgatgatgatcgaggtagtgaatggtaactgtgctatggcgcggttgtgtggacatcgtagccagcagtggcgttgcgtcctgactaacgggaacgaccggctgtttctgtgacgattgaggcgcttgacggatgggctcttgctcagagacagtttggcgtacatgactgttcggtagaggagctgcttttttcgggcgccatttcaataacgattgaagcaggttaatcagattcatacggactccttgtagcgcattacttattactactagtctatcataaattacaaaaagtgtggttgataattaacgcgtcaagtgggcataaaaaagaacccctgcaaaaatagcagtgattctaatcgtttaaatatctaatacttgtaatttagttgcagtatgggtgacgcggccgatggaaacgggaattaaggaaacgattaattctcctgtacgtgaaatgacggcgcgttctagatgcccaccaaaaacgcttgtatctaaacgagcaaagcttgcatgtagatggacatcaatcgtgccatttgcattttcgacattcccactaagggccagcagttctacttgctcttgactggaagtggcaatatattgatccgtttctggtgaataaacgctgacggtaacttcatcacaggcaccaatccccgtgatagttcccagttggttggggaaggtcgcggccaaatatttaagttctgttaggatttcgtcgcccacttctaaccggcaaataatttggtgctctttttgaaaagtcttcatcgcgtcattaatcctcctaaattaggttgaaagttattatacggtacgacctattcaattgccattattttgcctatgtaaaaaaccgccccaacaaaatgaaatgtcggggcggttcgaatgattaactcactgtttttgaaggtgttggaattgtaatttcgactaatggaccatcattcaagacttcaaggccatctgtggaatctaaaccggcgagttccttcaatacaaaatcgatctcggcttgttggacatgtcgatgatcattttttaaaaggagctcacgttccttcgatgaacgcgagtcaagaaccgttgttttaccaagtgaataaaccttaacgtaggttgcggctgttgcagcgagttgttgtgaaacaagtcgcttataagaattggttacattgattaagcgcatctaaatcactccctggatgtttaagtcttaccactagtataactgaaaacgcttcatttggcacgtaattcgttttaacttgagataataaagccttttaatctgtgacctgtgaatctttagcatcggtgatttgaatctgatcttccaccaaccgagccgtcaattgtttatgttctgggtgatcgagataatagtcagccacgcgatcttcaatttgttcttgaataacacgtcgtaatggacgcgcacccatctctggattgtaaccaagatcgacaagccgtgatttgactggttcagttacggcaatgtgtaacccttggtcagcaatcatcgcatttgtttgatcgagcatcagactgacaatcttcaagagattttctttgcttaatggttggaactcgatgatatcatcaaaccggtttaaaaattcaggtttaaagtagttttgtagttggtttaaaatcgagtgtgtctgaccagaaagggctgccccgaaaccaacattggcttcggcatcagtttggccggcatttgaagtcatgatgatgatggtgtctttgaagctgaccgtccgtccttgtgaatccgtcagacgaccatcgtctaagatttgtaggaacatatgcataacgtctggatgtgctttttcaacttcatccagtaagatcaagctgtatgggttgcgccgaacttgttcggttaattgacccgcttcttcatagccaacatagccaggaggtgatccaatcaattttgacacactgaatttctccatgtattcgctcatatcaaaacgaatcatggcatctgtgctaccgaaaagttctttggcgatttgttttgctaattcagttttcccgaccccggttggtccaacgaataggaaagaaccgattggtcgaccggatttgttgaaaccaattcggttgcgacgaatggaacgggcaaccttatcgactgctgaatcttgaccaattacgtgcgcttcaagattttcagcaaggttcttcaactgtgcttgttcttgtgcctttaactcaccaactggaatgtgggttttttcttcaacgattttttccatatctttgtcggtgacggttggcatttcagattggtcaatggcacttgtttcgcgcatcttggtcaattttgtgacttgatcgcggtaataagcggccttttcgtaatcctcgtcctttaacgcactttgcttttcagcttccgcattttgtaatttcttttcgatttcttttggatcgacaacggtaatcgtcaagttcttcttagagccggtttcatcaagtaagtcgatggccttatctggtaagaaacgatcctggatataacgattagaaagggttgcagccgccttaagtgcctcgtctgtgtagtggacttggtgataggcttcgtatttatcttggagtccttttagaatttggactgtttcgtcaacagaaggttcattgactgaaacgggttggagacgacgggcgagggccgcgtctttttcaatttgtcggaattcattattcgttgtggcccctactagttggagttcaccacgggcgagggcgggttttaacacgttaccggcgtccatgccaccttcggcattaccggcgcccacaatttcatgaatttcatcaatgaagagaatgtattgcttattctgcttcaattcagtcatcagttgttgcatccgttgttcgaattgaccacgaataccggtcccttgaacaagtgaaacaacatctaagcgaatgacttgtttatccttaagtttggcaggaacgtcatcgtcggcaattttttgagctaagccttcgacaacggcggttttaccgaccccagcttcaccaattaatacgggattgttttttgtccgacggtttagaatttcaataacacgatcgatttcagcgtcgcgaccgatcactggatcaatttggccagctttagctaagttggttaggtttacaccgtattgactgagcagactttcgccgttttgcccgttgttgccgccaccttggccgccactttgggtttgtggcccttggtttgcttgtgattgatcatcgggagttgcgcccattgctcggaagaaactatccaggcttccaaagccaaatggatctgcatattgcccttgtggtgcttggccattactgttttgttgtttcaagagttggtaacagttttgacaaagatcgatttcttgtcgttgaccattggtgcttgtatagagatgaatcgttgcaggattcttctggcagttttgacaaagcattaatctgtcacaacctttcattaataatagaatcgtcaaagtgttcttgactatctttgacctttatccaaattataatcatctctaaaaaaagttgcaagtcaggcaactcgaaaataaaagtttcttgtcaggtatgggcggtatgcggtagtatgaggtcatcgttttatttcgcagatggaatgaaaacgaatttttcaagccacgataaaagaattgcaaaggaggcagaatggcagatgcgtgattttttagcagagatggatgccttaataaataacgaacaaactgagattgaggttgctcagtccgaatttttagattttcagaaagtatgggtcaactatgaccatcgaaaagaaattgtgggcgaagcacaacgaaatggtgcggtaatctaccgcaagtctgaaagcggtatagtgtagacggctactaattttgttagcaaaactgttgtagtatttaaaaaaaaatggtaatcttaaatatcggaagggtagccactattagtgaccactcatttcgttaaaaactaaatctataattagataaaaggggatcgattaatatggaaaaacgcgattttcacgtagtagcagaaacaggtatccacgcacgtccagctacattattagtacaaacagcaagcaaatttaactcagatgttaacttagaatacaaaggtaaatctgtaaacttgaagtcaatcatgggtgttatgtcactcggtgttggccaaggtgctgacgttactatctcagctgaaggtgctgacgaagcagacgcaatcaacgcaattgaagaaacaatgaaaaaggaaggtttatctgaataatgacaaaactaagagggattgctgccagtgatggtatcgctacggcgaaagcctatatgttagtgcaacccgatttgtcattttcgaaatcaactatttcagattcagaaaaagagattaatcgtttgcataatgccttacaagcttccacgagtgatctagagaccattcggaagattgctgctgaatcattaggggaagaagaagcacaagtttttgatgcccacatgatgattttagcagacccagaatttaccggcgctatcgaaggtaaaatcaatgatgacaaggttaatgctgagcaagcgctcaaagagatcgcggatttattcgtggctacttttgaggctatgactgataacgcacacatgcaagaacgcgctgctgacatcaaggatattactaagcgagttctcagtcatttattaggggtaacactccctaacccagcgttaattgatgaagaagtaattgtgattgctcatgacttgacaccaagtgacacagcccaattaaacggtaaattcgttaaggcttttgtgactgatattggtggtcggacttctcactctgctattatggctcgttctttagaaattcctgcaattgttgggactgaaaatatcacaacttctgttaaagccggcgaacaattaattgtcgacgggattaacggggatgttattatcaatcctacagatgcagacattgctgaatacgataagaaggcgcaagctttcgctgatcaaaaagcagaatgggaaaagttaaagaatgaaaaatccgttacaaaagacggaaaaacattcacagttgctgcaaatatcgggacacctaaagatttagatggtgttatcgataacggtgctgaagcaatcggcttataccggacagaattcttatacatggactcatctgaattacctagtgaagatgatcagttcgaagcttataagactgttttggaaggtatggctggtaaaccagttgttgtgcggacaatggacattggtggggataagaaattaccttacttgccattacccgaagaaatgaatccattcttaggctaccgtgctgtgcggattagtttagatcgtgatgatattttcagaacacaattgcgtgctttactccgtgcttcaaactacggtaagttacgtatcatgttcccaatgatcgcaactgtcgcagaattccgtcaagcaaaaggcattcttgaagaagaaaaagctaaattaattgctgatggtcaaactgtttctgatgatttacaagttgggatgatggttgaaattccagccagcgccgtcttggcaaatcaattcgctaaggaagttgacttctttagtatcggaacaaacgacttgattcaatacacaatggctgctgatcggatgaatgaacgtgtatcatacctttatcaaccatacaatccagcaatcttacgtttaattaagaacgttattgacgcttctcataaagaaggtaagtggactggaatgtgtggggaagccgctggcgattcagtcatggcaccactccttgttggaatgggcttagatgaattttcaatgagcgcaacttcggtccttcgggttcggagcttgatgaaacgtttagatacaactcaattaactgatttagttgaaaccgctgttaatgtgaatacaagtaatgaagaaaaccaaaaattagttgaagattttatgcaaaatctttaattaaatggtaaaagaccgcccactgtggcggtctttttttgtgcgtaaaatttggatgagcaaaaaagattgacagttatcgattacaaatgtaaactgtaactaatgattacaaatataaacgaaagggagaaaaccgcgaatgactgaaaaaataggggttattacggatgcggaatgggaaattatgcggatggtttggtcacttgggcaagtcaacagcagtcatttaattgaactcgttcagcaaaagcgtgattggcaagcgtcgactgttaagactttgctaggtcggttggtaaaaaaagactatctaattgccactaaagaaggacgccgatttatatatacggccaatatcgcagaagatgaagcgatgaaccatgccacgcagtcgctgtttaaccaattatgtgggatgaaaaaaggccgcacattagccactttaatcgagcaaacaacgctcagtcaaaatgatattcagacgttacaaacggtgttagcggctaaattacctagtgcaccaacaatgattgaatgtgattgtttaccagccaattgtgattgcatagaggaggaagtaaaatgaaacacgatgaaatgcaccatgaacatgaaggacacgatatgaaagagatgcagcacgagcaccaaatggatcacagcatgcacgacatgcatcatgaccatgagatgatggatcatgatatggggcatatgaatcacgatatgcatgggatgcaccatgacatgggcgacggcgatatgatgatgcatggtggtcatatgatgcacatgggaaatctgaaacaaaaattctggatttcattaattgcaacggtaccaattctaattctctcaccatttatgggcatgcagttaccttttcaaacgactttcccaggttcagattggctagtattgattttagcaacatttctcttcttttacggtggggcaccgtttttaaagggcgctcaaggagaattatctgctaagagcccagcgatgatgaccttaattgcaatggggatcagtgtttcttatctatatagtttatacgcctttgttgcgaaccatttcttgaacccacaaggccacgtgatggactttttctgggagcttgcaacgttaatcgtcattatgttgttgggacactggattgaaatgaatgcggtaatgagtgcagggagtgctttagaaaaaatggctgctttgttacccggccaagcacaagtaattgatcaagcagggcatcaacacgcggttgatttaaaggacttgaaaaaaggacaaactgtattagtcgcagctggtgaaaaagtacccgcggatgggttaattatcgccggtcaaagccaagtcaatgaatccttagtgacaggtgaatcaaaggctgttgcgaaggctgaaggcgatcaagtaatcggtgggacagtcaacggaaatgggacgttaaccgtgcaagtgaccgggactggcgaaagtggttacttagcgcaagtcatgaaattaattaaacaagcacaacaagaaaaatcaaaagttgaagggttagcagataaagttgcgaagtatcttttctatgctgcattggttgctgggattatcgccttcattagttgggtgttcttggccgatctgaatacggcttttgaacggatggtaaccgtctttattattgcttgtccgcatgcacttggattggccattccattggtggttgccagaagtacagcgattgcggctacaaacggcttgctcattcgtaaccgtgaagcaatcgaattgtcagataaggttaccgttgttttgatggataagacggggactttgacacaaggcgcattcaaagtgaatgctgtcgaagttttcgatacagcacttgatgaacaacgactcatgcaactctttggtgcgttagaacgccattcaagtcatccattggccactgggattctagagtataaccaagcacaaactattcctgatttacaggcagacaatgttcaaacgattcaaggcgtcggtttgtctggaacggttgcagggcaaagttatcaaatagtgacggcaacttatttacaagcccagcatattaaatttgatcaagctcttttccaaactttagcagaaaaagggaattccatcagttatctattacaagatcaaacggttttaggactagtcgcacaaggtgatcagattaaaccagaagcgccagctttcatccaagcattaaagaaacggcatatccaaccggtcatgttaaccggtgataatcaacaagttgccgaaaaagtggctgcacaattgggcggtatgacggttcaagcgaacttgaaaccagaagataaagaagcaatcgtcaaagattaccaagctaaaggcgaagtcgtcctgatggttggggatggtgttaatgatgcaccaggtttaacgcgggctgatatcggaatcgcaattggtgctgggacggatgttgcaatcgattcagcagatgtgatcctcgtgaagagtaatccaaacgatattatgcatttcttgaatttatcgcacgcaactaaccgcaaaatgacgcaaaatctctggtggggcgctggttataatattttagcgattccattagctggggggctatttgccggaattgggttagtattaagtccagcagttggtgcaatcttaatgtcactctcaacaattgttgtggctattaatgcaatgactttgaaattaaaacgagatgcatgatgtcaatctttttttaagcagtatgaagtagatttcgataaggacgggcgaaagaaaatatcgcacacaattagacgcacacaacatatagttgcagtgcgtctttttgttggtttatctactatatataggttgaatctgaatttttaatccgctatgatggggttactgattcaaaaggagactggtgctaagatggatatgaaaattgcttcagaagcagacttgcaaattaaagtgattaaaagagatgggcgaatcatgcctttttctgcggataaaatcgaacaagcaattattaaagccgctaaaaatgtgaagacggaattagagccattagactatcaagtgttaaacacagtcgcactagatgttgtgagtgaagtcggcagccgatttgataaagatgttaaaatctatgaactgcaaaatattgtggaacataaacttttagaacatcaccaatatgatattgcccaagaatacattaactaccggacgcaacgggactttgcccggaataaggcaactgatatcaactttaccattcaaaaattattgaaaaaagaccaaactgtggtcaatgaaaatgcgaataaagatagtcatgtttttaatacacagcgggacctaacggcagggacagttgctaaagcgatggggcttaagatgttgcctgataaagtggcgaacgcccatttaaaaggcgagattcattggcacgatttggattaccaaccatatagtccaatgaccaattgttgtttaatcgattttaaagaaatgttgaatcatggctttaagattgggaatgccgaagttgaagcgccacattcgattcaaactgctacggcacaaatgtcacaaattattgctaacgttgcttctagtcaatatggtggttgttccgctgatcgggtggatgaattattggcaccatttgccgaaaagaattatgccaaacatttagcagatgccaagaattggattgatggcgaagcaaaacaaaaggattatgcgcaaaccaagactgaaaaagatatttatgacgccatgcaagcgttggaatatgaaatcaatactttatattcatcccaaggccaaacaccatttacaacgcttggttttggattaggcagtaactggattgaacgtgcgattcaaaaagcaattctttcaattcgaattgaaggattaggtaaagaaaaacggactgccatcttccctaaattagtttttgcagtaaaacgcggcttaaacttaaatccaactgatccaaattatgacatcaaacaattagctgttgaatgtgccacaaaacggatgtatcccgatgttttaatgtatgacaagttggtggaattaacgggttctttcaaagcaccaatgggttgtcgaagcttcttacaaggctggaaaaacgaacatggtgaagaagtgaatagtggccggatgaatctcggcgtggtgacaatcaatttaccacggattgcacttgaagctgatggcaaccaagctaagttctgggaaattctagaacaacggttgcaagtctgcaaggaagccctggtctttaaagtggaacgcgctaaagaagcgaagccagaaaatgcgccgattctttatgaatatggtgcctttggcaagcgtttgaagaaaaccgatagtgttgatgaagtctttaaaaattcacgcgcaactgtttcattgggctatattggcctttatgaagtcggtacagctttctttgggccagactgggaaaaggatgccaaggcaaaagcctttacggtagacgtcgttaaagacctctataatcactgcgttgattgggaaaaggaatacggctatcacttctctgtttacagcacaccagcagaaagtttaacaaatacgttctgtcaaaaagatacgcaaaaatttggcattgtcgaaaatattacagacaaagaatactacacaaatagtttccactacgatgtgcgtaaagcaccaaccccatttgaaaaattagattttgaaaaagattatccaaaatactgttctggtgggttcattcattactgtgaatacccaaatctgcgtcaaaatccaaaggctttagaagctgtctgggattatgcttacgatcgtgtcggctacttaggcacgaatacgccaattgatcaatgttttaaatgtgggtttaaaggggactttaagccgacagaacgcgggttccaatgcccacaatgtgggaacacggatgctgctacatgtgacgtcgttaagcggacttgtggttatctaggtaatccacaacaacgtccaatggtgcatggtcggcataaggaaatcgccagtcgagttaagcacatgcatattaccattggcaacgataataacaacgttgcacggcagtaattgtgaatacgggatttgaaggagtttttgaagatggcagtaaaacaacaaggcccgaagaatccggcgcccaaagaatggctttctgaaacactaagccaggattatattgcagattataaaccgtttaactttgttgatggcgaaggggtgcgctgtagcctatatgtgagtggttgcatgtttgcttgccccggttgttacaatcgagtggcgcagaattttcgctatggccgcccttatacaactgaattagaagaccaaattattgctgatttagggcaatcttatgtccaaggactgacgttattaggtggcgaaccgttcttgaataccaagacttgtttatcgctagtagaccgaattcgcgccacttatgggcagacaaaggacgtctggtcatggacgggatatacgtgggaagaactgatgcaagaatcagatgataaactcgagttgctgtctaagattgatatcttagttgatgggcgcttcatgaaggaccaaatggatctgacattgcagttcagagggagtgccaatcaacggattatcgatgtcaaaaaatcattagccgctaaaaagcccgttatatgggcaaagcttgttcattgaaagtaatatgtaaaataaagttattaaaaatttaattttcattttccgtcattggtatatacctaacacggataaaaaagagcgtcaatccatgattagaatgggttggcgctttttttagtttttgtgaaaaactggacattcataggtaatgaacggggttatcgtttgacaacgctttctgtaacataatacttgtaatagcaattattttttaattatgattcaggaaaaggagtgaggttaatggattcatttatcagtttcatggagaaacgctttttaccagttgtggcaaaagttgggaatcaacgacatttaccattcgtgacgccttcgtaacaacgatgccattgatgatcttgggggcttttgcaaccttgattaataatttaccaattccggcatataccaatttcatggatagtgtgttctcaaagacagttggtaagggcgctgaaaaggcttatatctggactaaattcgggggcaatgcttggagcgggatatttgcgattctttctgtgtttatcgtcttcctagttgcttacaatttaggtaagtcatataatatcaatccactagcagccggcgtaacagcattagggtcattctttgctgctggcggtcttgcagggatggactcaatgggcttgttcgttgctttaatcgttgcgatgatttcaatagaaattctcagacgtttattgggtaataaacacttagtcattaagatgcctgatggggtaccacctgcaattacagctaacttaaatgcgattaaagctggtaaagcagcaccatatattgttaacaaaccattctttgattcatttgttaacttaggtgggactggtgctactttaggcttaatcattgcaatctggttagtgggtcgaaagaataaacaatattcaatcgttgggaatttgagtgccgctcctggggtcttcaatattaacgaaccattaacatttggcttgcaatcgtattgaacccaattttattcatcccatatattgccacaccaatggtgatcgttacaattgcatactttgcaactagcaccgggttagtgcccgctgcaacgattatgccaccttgggtaacaccaccaattatcggtggggtcatcgcaaaggttagttggcaaggtggggtattagcagcagtgaacttacttgtttcagtgctcatttacctaccattcatcaagatcgccacagacatggctttaaaagaagaagcagcccgcgatcaagcggcttaagcacaaaaaaaggtccgacatgaatgtcggaccttttttttgtgcctataattaatgagttgactcacttgcaatggtgacgtgcccgttttgaacgttaccaatgacgatattgttcgaaatctggccagcggttgcatcggttagatagttgatactatcactcatcccgacaacagcgggacctgctttgaccgtaatggttgaagctgattcaccaggcttttgttgatcaagttgctcaaaaatggtttgatcagtctgtgataaatcggcagcagctactagtgagtccgtcttttgatagcttgttgcttgaccagcaccgatgcgtagcagttcatgatcattcatgaagaggtagagataaccgatactatcaccactagcaatcgacttaggggttaattgataaccagcttgtgctgcatcccttttttgagcagcatagattgtattttgattgagcgttactaaagtgtatttggcaagatcttgaatggcagagcgttcaatactattataacgtttttggtacatgaagccatctttgaccatcagttttccggtgtcattagcactcgtcgttgttgcggccgcaatccaagtgccattgagttggtcgagggcaacaggactggctgttgttttggcggttgctttttgactgacgaataactgtccgcggtcaaaattggtggggttttgtagatctctgtaatgagctgtaattgcgtataggcgatttcctttggcaacgaatccctggtcaattgtatttttcccagtcttagtctcaagaaagacgagatctgagaggtgtttaatcttaaagtcagcccccaatttgtgtaatgcagcgttgacttgtgccacagtcatcagatggagtgtcttttgatagctcttcatcagatgactgcggctatcttgttgccattttttaaacgaaatttgttgataattaatcggctgacttgtgaaggtgcctttagaggtcagccaacttttaggagtggtcatttgagcaatatttgaaacagtgatgtcatcagaaagaccgtttttagtttgcttagaaaggagttgtttgttaaacaaccaagtctgtgaatcggccgcgagggcttttttagttgttgtccggttggcgtaggtcgtcgtagttggctgcgcgcgggatgtggttgatgaagccggttttttagcttggcaacctgctaggagtgttattgttaaaagggtagtgattaaaagtgttttacgcattttgaagctccgtttcatttgtctgcaggatgggttttgccgaataagccgtcatcgtcatccgtgttgtagtaacttaaaaaaggaaagagtagtttaaaagtggaaccactgccttgttgggagctaacggtgagttcgtgaccgagcttttcacttaaggcacgtgcaaggtagagccctaaaccggttgaacgttggttagaatagcgcccattttgaccggtgaaccctttatcaaaaatccggggtaggtcttcagccggaatcccaatccctgtatcgatgacacttaaccaaacgccttgttcgtcacgttcaatctgaaccgtaatttgtgcgccgtcgggggtatactttaacgcattggaaatgatttgattcaaaataaaagccagccatttagcgtcggttaagacggtttgatcggcaccaagcagtttaaattggatgtgtttttgaataaaataattgcgattttggcggatgatttggttgactaaaggttttaaatcgtattcctgcaccaagtaatccttagaaaaactatcgagacgcgagtagtagagcacttgttcaacgtagtgttcaatttgaatcagttcatcggttaattgattgaatttgtcttctggaatctggtcttcgatggattcaatgagcaattgagtagctgccagggggaccttgctttcgtgcacccagccatcaatgaaattcttttgatcttgttgcgctgagattagtcggtcgatgctttgttgatgataggctagcagttgattcacgtagtgttgaatgaattgtttttcagccgaggtagcgcctgtaagtggccagttgaggctatcttctttagcatctaagcgtgtttggattgtgcggtaccacttgagatggtagacgtataatccaaccaaaaaggcgcagaaaaaaagcgccagcaataaatcgaggtataaaagtgtcgccttagcaaagcgcatactagggtcgagccataggacgatatccagaacaatcataccgctgaagaaaaaagcgatatgaaataaatgatcacgtaagaattttttaaacgtcataataactccttaggggatgatatagccttggccaattttcgtctgaatgtagtcttctaaaccagcactttcaatttttttgcgaagccgattgatgttaacggttagtgtgttgtcgtcgacaaaccgttcatcgtcccagagggcacgcaataacttttcgcgactgacaatctggccgtgttgacgcatcagaaattggaggagcttatattcgtttttggaaagatcaatggtagtctcacccacctgagctccgccgctttggaggttaatcattaggccgttatgttcgatgatatcggcattttggtcgacgtagttgtaagtccgtcgtaagagggcgttaattttggcaattaaaacttccatcgaaaaaggtttattgacgaagtcatcgccgcccatgttcatcgacatcaccatgtccatgttggtactgcgactagaaatgaaaattatggggactttagatacttcacgaattttgcgacaccagtagaacccgtcataaacgggcaggttgatatcgagtaaaatcagatggggtttattggttaaaaattggtcgaaaatggtatcgaaatcggtcgtaatatttgcgtgtaattgccacttatttaagttctcagcgattaagttggcaatcgttggatcgtcttcaacaatcataatttcaaacataatgaattctcctcatacatagatagactaatactaaccactttcactagaaaagacaaccaactaaggtcgtagttataaaatgggcttttgcggtcaactctgctaaaatgaataccaattagttaagggatgtgaaaaaatggcagtcgtatcagtccaacaagtttcgaaagtctacgggcatcggtttagtctggtcaatgcgcttaataatatttcatttgatattgaaccgtgggagtttgtcggtattatgggcccttcaggcgctgggaaaacgaccttattaaatatgattgcgaccattgatcggccgacgcatggtcaagtgttaattaaagatcaagttgtgagtcggatgcgggaagctaagcttgctaattttaggcggcaagatttgggctttatttttcaagattttaacttactagattcactgacggttcgcgaaaacatgttactgccattagcgcttgataagttaagtgtgccagtgattgaaaaacggttggataaagttagccgagtcttgggcattagtagtttgttggatcgttatccggatgaagtttcaattggacagcgccaacgagtggcatgtgggcgcgcaatgattaccaatcccactttgttattggccgacgaaccaactggaagtttagattcaaaatcagctacggagcttttacaatatttaaccgtgattaatcgtcaggaaaagacgacaattttattggtcacgcatgatgcctttacagctagttactgtcggcgaattcttttcattaaagatggtcaattattctcggaaatcgttcgcaatggtgatcggcaacaattcttcaatcaaattattgatatgcaagcaaccataggtggaggaggccgtttcaatgctgttacacctaaccgttagaaatgcgattaatcatgcgcgcgactatgcggcttatgtgattgcctgtgttgccgcgattgtggtttatttctgctttacgtcgattcaaactgcgccaatctttaggcacctcaagatggctggtgaatctttagcttttggccggatgatccaagtagcaggtttaattattttgctgtttgccgcttttttcttggcatatgctaatttatttttcattaaaaggcgtcggcgggagattggtgttttaagtgtcatcggggtgactaaatttcagattagcttactcttcttctttgaaagtttgattatcggtgtgattgccctgattatcgggttgttattcgggattcttttttcgaaattattcgcgatgttattattacgtatgatggggattgcggttgccatgccgtttttaatatcatggcgggccattgaacaaacgacattcacctttggcgggttgttcctattaactggttttttaaacagtacgatgatttatcggtatcaattagtgacattgctgcaaccatctgcagtcagtcggaaagtgcgccgaccgaactggctgacttatttatgggggattattgcacctgtattgattatcagcggctattatttggcagaccaaacactggttttgatgccgagcttagagcggcgctatggttttgggattgatttggtttatttactaaccattttattacttgaaatttttggcacactggctttttttcaggcctatacgcaaatttggctacagttagaacggcactggaaacggctttattatcgtgggacacatttgttaaacgttacgaatttgagttttcgttttaaaaagaatgcaaagatgttgtggatgattacgattttaagtgcagtcactattaccgcaatcggaagtgcggcgatgatttatacgcacggtcaagatacattacggcagaacattccagtggatttggtttatacacaaagtcaaaaagcagcggtcgacaaaattttaacgcaatatcatgttcagccggttagtcaaacaatgtcttcgtttaaattggtggatgctcgatttaaggtcaattcaccgttaaatcgggaaggcatcaaaatggatggagcagctgttgtcatgccattatcccaatacaaccaagtaatggcgcaacaatttaagttaccagcaactaaattgaagaaaaatactgtggtgaccatcattaacttgccattaacaatgctgaagatgcctcgcagagcaggtgcaggtttgccaccgaaaagagctggaatcccgttgcaattaaaacagtctgggctttcagattttcggattgtacacattcgtaagctatttccaaacggttctgatgtcttctttgatggtaacttaaacgtgattgtggccaatgatgctgaatatcaacaagtccaagcaacttcagttgatcaaatctatgcagttcagctctccgctgcccaacaaaagcaaaaacgattaatgcgcgatttattccgtctatctcaaaagcccaaacaatgggattatttaatgacgcacaaaaaagccgggcaaacccattatgaaattaaaaccactgatcaacggctagaagagttaagccgctattctgtgcttttaaaaaaacctaaccgagatattgctaacgcaaacttcggattttatatgtatgtcgccatttttattgggttaatcttcatgttagccactggtagtatcatcatgttgaaacaattgtcagaagcacaagaagagattttgcagtataaaacattgaaaaaaattgggatgagtgacggtgagattaagcgcacgatttatttccaaattttgatgctctttttactgccaattattttgggatcgatgcacgccttctttgcaattcggttattgggtttgtttttagataatcctgggttacaattagcctatatcgtttgcggcctgtttatcatcatttactttgttttctatctaattacggccaatatctacaatcgaattgtgaatgcaccgctcaatagtgatgtgttctactaaactcggagggaaagtttttgcaattagctatgtaccgcgcaaaagcgcgtcaattattaaaaggaaactggcagaaaatggccgctttagtcgcgctttggttgttagttgagatagtagtcgactcaatgattgaaggcgtgtttggcgccagttcatttggttatcaaatgctcaacacctttgccaattatttcttatactttatctttttaaatgctgttttcttaggtgtttataaagttagccagaataagcccagctattaccgggataccttattgttattccggcaaccgttgtatacccatcttgtggtattgaatcttgttcaacaagtgttaaactggatcttactattaattgggttggcgccgttttatcggttactcggttgggatcgtgtatttcaattcacttttaatggattagattccgttgcgccttatttgctaaacattagccagcaggggacaatttctgaaactgtcttattgtttgtgacggtgatgttggttttgtcactgttgcaacccgtgattttaacgtattatcagattttagtactgttgaagtttgatttaccacaagcaccactcaaattaatctttagcctttcatgggtgattttaaaagggaactggctgaaattactcgggcttactttatcatttattggatgggaactggtcgtctatatgactgctggactaggtctcttgtggttctatccatacttaattatgagcgttacgattttctatcaagaagttaaagctaagaaagtccaagtcattcaatagcattagggccgtcatccatttgggtggcggtctttttttatttagttagtaaatatagtgcgcgcgatacccggaatgcgctactatagaaattagaaaggtggtcatttaaaaatgcaattaacagtcttaggttattacggtggatatccatacgccggtgttgggactagtagttatttattaacaagtggggcgtatcatttattgctagattgtgggagtggcgctttattagcgcttgagaaacaatttgacccattgcaactagatgtggtccttctcacgcactatcatcacgatcacattgctgatgtgggggttttacaatattattggcaactgcatcaaggaaccaaaaaggaacccattttacctatttacgggcatctgcaagatccactccactttggcagtttgacacaaccgggtgtgacgcagggctttggttatcaagaagacacagagctgaccctggggccgttgaaagtaactttcaaacggacagtgcatcctgtcccagcattcgctgttcgaattgaagaacaaacgacggggcaggtcttagtctttactgcagatacggcgtatttcccagaattagctgctttttgtcagtctgcagatttactgatgactgatacgaattttcttgaagatcgcactggtaaaatggcgcatatgacaacaacgcaatccggtaacttggcacaagaaagtggcgcagctaaaattctattaacgcatttaccacaaggggtttcggcagaaacgctacaggcacaagcacaagcgactgttggggacgtacccgtgatagttgcccaacaggatttgacaattgatgtcggagcgtgtaatataggcggcgttgatgaaacttacaaaaaataagtgaattttcattagaaagtagaaactactataatttttttgaatgataaatataaatgtaaaaacataaaaattaatggtgagtgggaaaatttaacaataaaccgttttaattagacgttttatgttcaaatgtatatttattaattattaaaaaataattaagaaatttaattttagggtagttttctagtgctgactcgcgtataataaaatttgtaagagagaaaatgattgtcttattgttaagtaaggtgtcatgttaataaaggagagagacatatggttacgttatatacatcaccaagttgtacatcttgtcgtaaagcccgggcgtggttagaggaacacaatattccataccaagaacgcaatatcttttcggagcctctcaataaaaatgaaattaaaacaatcttacgcatgaccgaagatggcacggaagaaattatctcaacgcgttctaaggttttccaagaattaaacattaaaattgatgacttatcaatcaacgaattattagatttagttcaaaagaacccagggctattacgtcgtccaattattttggatgaaaaacgacttcaggttggttataacgaagatgaaattcgtcgtttcttaccacgtgaagtacgggcattggaattacaacaagcacaattactagcaggattctagaggatagtcggggctgttaacagcctcgacttttttgatgggttaaaaaattaattgctgcgatgtagatacttgaatgttacgccagatactggtatggtaggtcaaagaaagtgaattacgacgctataagaagcgcgttagaaaggggcgttgtcccatgagaatggaaaaaatcgacgagaacacaattcgggttctattagaaaatgatgatttagaagaacgcgggattactggacttgatttgttgagcaatcataaaaagattgagcggttcttctattcaattctggaagaagtggacagtgaacacacatttgcgaacaacgatgcagtaacgttccaagtgttgcctaacgatcaagggttagaattactgattagtaagaatatgccaaactttgacggtggtaaaggtcaatcagaaatggtgcaaggcaaagacggtattactgaatacattaaagaacaactgttgaaacgagatacggtccaagatgatgcgactgaggaagaggatgaaatgaccgcttatatgaatcaagcggacaatccaatgaaacagattgtgttatcgtttaagtcatttgacgattggattgctttggcacaacagctacacatcgaaagtggtgtgtcgaacctatttctttacaaacatcagtactatgcacagattattatttttatggagaatacgaccgaagcgtttgcacgggatgatttagcggtcgctaatgaatacgggcagaagtcagaatacacagcagcttttttaagtgaattcggtgaaaaagtcatggataatagtgcgcttgagttaacacgctactacttcaaacattaaaaataacgggttttcctaaatttaggagaacccgttatttttttgcgtattttcggtgggggtgataaataatgaaagttgcacagaccactaacgggtgcttaattcgcgccgatcaagcagccaaacaacagcaagtagcgcggtatttctgtccacattgtcaacaactggttcagttgcatcgtggggtgcataaagcaccatatttcgcacatatcgcagaacgtgtatctggtggtggtgagagtccagcccatctggcgggaaaacaggcgattgctgaattagcacatgcgttgggctggcatgctacctttgaagtacctgtcggcgagacacagcgcgctgatgtatggttaacgcggaatcagcaaccattaattattgaataccaatgcagcccattgacgccagataagttaaaccaacgaacaatcggctatcagcagcgccgattacctgtattatgggtggttggtgaacggtattgttttactaaccattatttaagccagcaacagttggggtttatcaactatcggcggcagtggggcttttatgtggtaagttatttgccaaagtgggggcaatgggtgttatatcaccatattgtcgcccgtgattttgctggttatgcttggcaaaccctgcgattgacaactaaggcgtttgtgcgcttgcttgtagcacaaacaagactgccagccaatcattataagggcaagtcacagcctatgcagcaacaaattattgaccgtcgattagggctgcaagacgcacattatgttgcgttacaggcggattgttatgcccaccatgaacgcttgcaagccgttccggactggtgttactgcacacgtaatgtaccacccatttatcagctcagtcagtttgaaagtcgggtaacgtggtggttgagtgcccaaccaattgatctttttttagcggtaacgcccttactccaacaaccactactaaagcaatccttatttgcacaatgggggcaaatagctttgaaacaagcattaaaaaagaaccgggggtcggttgaccaccggttctaagattaagaaataacatgcaaagcaacccgtgagagggtgcttttttgtttttgaagtgcttggaaagtctgttcaggtgttgtttcagcacaacaggcttgtttcaagagttcataggaatcgcaattttcaatcaataagcctgattcgctttcaccttttgaatagttgaagactactgctgaaggggtcatctgaatgttcatctcacaagataattgttgatctgaatcaaatgcctgtttagtaagtggactgtgccaatcttcaagtaacatttcggtatcaagtcctacgcgtttagcaattgtaaggactaattcgttgttaagttccatatctggttcacggaatgcttgttgcagttgcattaaaaatgattggctcttcttgcccccctggaacgttgctgccttataagcgagtactgcttcataaatggtgctgaaaacgtgattacgtaagtttaaatcatgactattttgttgctgaaactgcatgtaatgctcgacgttttttaagtttaagactggaataaacttaaaatgaatatttgcatcggtttcgccgataatctttaaaagtgcctcttcggaacgtaaacaaagttgcccgattgggttgataaataaaaacacttctaacaagttggttcctccaaactttctatattgtatatactgctcgacgcgcttgtactgtctactctaacaaaattttaaaattatgcaataagttagcttgacagagtttaagcttgatggataagggcgcgcataattttattgggtggtatttgttcacttaattgatagcgggtgacaaatgatttaaaccaagttgccccttcttggacgttggtgacttcaatttcgacttcataatcctgggtttcgtcagggtattgggtaacatcaagcgttaacaggccagcaactaaagacgcggtctggcggtgcgttgttgcctgtccccagatgaacaattctttgataatcacggcttgtgctgcaaaatagacagcgatctgaccagacgataatacggtttggtgctcaattaagtgagtagcctgctcaagtgttagacgatcagtgatttcaatcagactatgagcattttctacggttggcacctttagcgtctgttcggcataggtgtcaaagagtcgaatacgcaacccccagtgacgtttagccaatccctggttaggcagttcgaagtaataattggtttgcacaaacggcgctgcaaatggatagtccgcttttagttgcgagaattgcgccgccgttagcatcgtcttaaattcgcgttcaatcgtttgtgacatcggttgagctcctttttaaaaaagcaatgttattatcctagcacaaaaaagcagacttgtaatgaaatttgtatttcagacgattattatttattcaattctaatctatgttaaaatagtgctgtatgtgacagagtgaatgaggggtttataatggtcgaaaattggaagaagtttttaatgccttatgaacaggccgttagcgaattaaaaattaaattacgtgggatgcgcaagcaataccaacaaaataatgaacatgcacccatcgaatttgtaactgggcgcgttaaaccaatcgatagtatcaaagaaaagatgcaacgccgctacattacagaagatttactcgaacaagatatgcaagatatcgctggtttgcggattatgtgtcagtttgtggaagatatccatgaaattgtgggccttttgcaccaacggactgatatgaaaattgttgaagaacgggattacgtttcaaatgttaaaccaagtggttaccggtcatatcatattgtaattgaatatccagtccaactaatcagtggtgaaaaattgattttggccgagattcagattcgaacaatgtcgatgaacttttgggcaaccattgaacattcattaaattataaatatcaaggggaatttcctgaaacgctgaaggcgcggcttaaaagagcggccgaagcatcctttatgttagataaagaaatgtctgaaattcgtgaagaaattcaagaagcacaacaactcttctcatatggaaaatggcaaaacgcacttgaaaaggcaactgaaaatgattctgaaggagagacgccagattgaaagtaacggtatttagcaatgacggtagttcttccgttcaagttgccaatcgcttaacgcaaaaattgatcaatacggggtttgtcattgatgatcaaacgcccgatgtggtcatttcagttggtggagatgggacgcttttatctgcctttcatcggtacgcccacgatttagcgcacatccggtttattggcgtgcacacgggacatttagggttttacactgactggcgcgattttgaagtcgatgatctagtcgtcgccttgcaagaagatctcgggcagagtattagctatccgttattagaagttaaaatcgaatatgcggatacgcacgaaatcagtcgcagtttggcgctcaatgaagtgacgttacgtcggtatgcagcgactttgcggacggacgtttacattaaagagaatttttttgaaagttttaggggcgatgggctctgtatttccacaccaactgggtcgacagcttatagtaagtcgattggtggcgcggttttacatccacgcttagacgcgatgcagatgaccgaaattgcgtcgattaataatcgcgtatatcgaacactatcggcaccaatcgtgttaccatcggatgaatggttgctcctgaagccttctaagacaagtgattacgttgtgacaattgatcaattcacatttaaggatcgaccaattgcctcgatgcaatttaaaattgcaaaggaaagaatacagtttgcacgttatcgacacacccatttctggaaccgtgtcgaagatgcatttattgggtcaaaacatgaaatttgaatggcaatatcaagatgcagaaggctgtgtgttgcggaattttttacggcggcataagctttctcgcagtcagttaactaaaattaaatttgcaggtggcacaatcctcgtcaacggccaggaggcacataccaatgcccaactggttcaaaacgatgtggtgactgtttacctcgcaccggaagtggccgtcgaacacgtcatcccagttaaaggggacttgaaagtggtttttgaagacgaccattttttagtggtcgataaaccggcgtttgtggcgtcgttaccggcaccgaaccatccgcacaacacaatggccaatttcgtcaaacaatacttgattgaccaaaatgctgagagccaggcagtgcacgtagtaacgcgcctcgatcgcgatacaagtggtttgatgatgttcaccaagcacggcttcgcgcatagtttgttggataagcaactccaatctaaagaattgcaaaaaacatatgttgcgattgccagtggtgatatgcggttagattatccgcaacatgcgtggattgatcggccaatcaaacggtcggatgatttttacatgcggcgggtcgttggggttggtggcaaacgctcattaacggaatattggcaagaagcccatggcaccgatgccacgttagttaagttgaagttactaacaggtcggacacatcagattcgggttcattttgcatcactggggcattccttaattggtgataatttatacggtgtggccgatgatttattaccgcgtcaagcattgcactgtcgcgagttaacgttctatcatccatttgaagaacggtatgtcacggttcaaagcgaactaccagccgattttcaagcagtgatggatcaacgtcatttggcttttcctgcgggcgaattgaataaaatttgattaagctttcaatttgagtcgcaatctaactttagaatgagtatactaataaacgattatggattacggagggattagtattgtgttaactttaaatatgattaagacaatcattttagggattgtcgaaggttttacagaatggctaccaattagttcaaccggccatttagtgttggtcggtagtgttttgaaacttgatgaatcaaaagcattcatcgatatgtttaattatgtgattcaatttggagcgattatggcggttgtgattctatacttccataaattgaatcctttctcaccacgtaagaaccagctcgaacaaaaacaaacgtggacgttatggtttaaggtaattgtggcggtgattccatcagtcattattggattcccattgaatgactggatggatgaacatctgatgaaaaactggattgtggccagcatgttgattttatacggggttttgttcatcgtcattgaaaatcgcaacaagcataccacaccgaaatttgctgatttaaatacgttaccttggttgacggccttttggattggctgtttccaagccttatcaattattcctgggacatcccgttcaggcgctacgattttaggggcaattattttagggacatcacggtttgtgggtgcggaattctcgttcttcatggcgattccaacgatggtcggcgtggcaatcttgaagattggtaaattcttgtaccaaggcaatacgtttacgggcgatcaatcaatcattttattagtcgggatgttggtttcattcatcgtttcaattatttcaatcaaattcttgatggattacatcaagaaacatgatttcaaggtcttcggttggtaccggattatcttgggcctacttgtcttaggtgcaatgctatttgcataaaggattaaattaaaatttggagggttcatccatgttaatcaaagaagtttgtgttgaaaatttcactaaaattccggcagcaatccgcaatggtgctaaacgaattgagttgaacgacaacttggctgtcggaggcacaacggttagccggggtgtgatggctgaatcagtgcgttatgcgcatgaacacgatgtaccagtgatggtcatgattcgtccgcgtggcggcaactttgtttataacgatcaagaattaaaaattatggaagctgatatcttttcagcgcaagaattaggcgctgacggcatcgtccttggttgcctaacacctgacaatcaaatcgacgaagaagcgatggaaatgttgattggtgctgccaatgggatgcaagttgttttccatatggctttcgatgaaattgcggctgatcaacaagctgcagcaatggaatggctgattgatcatgatgttaaacggattttaacgcatggggggccgttagacgcgcccatcgacgaagcccgtttaaaaacgttaattcaagttgctgatgggcggattgtgattttacctggcggtggcattacagccgacaatgtcgacgcgttaacagaacgtttacaaatttccgaagcacacggtacaaaagtggtcgggacattataagatagtaaaaggcccagtcatcaatgattgaagtgcttcataatagttagacaagaaatctaacagttatggagctctttttatatggtcaaatacagttctagtttaaaagctaagatagttggtgagtatcttcaaggaaatattagtgccaaaggaattgccgaaaaatactatttgcctagaagacaagttgctcattggattcaaagatatcgtttaagcggtgtagattcgcttaaacgtagaaatgttaaacgagaattttctgccgagtttaaattagatgtgatagactactatcaaactcatgacgagtcacaaagtgaggtagccgctaaattcgatcttataccatgtcaaattagtatttggcgcactacttttaatcgagaaggtatattaggtttgaagcctcgtccgaaaggtagaccgaccaaaatgaaacgaaataaaaagcaattacgtcaattagtaaacaaaagtgaagtagaacgtctacgagaggaactcgcagaaaaaaacaaggaactttatgacactaaattggaacgtgatatcctaaaaaaatcagtgaccctgttcggaccctcaaagggaaacgaaaaacacaaatagtagatcagatcagggctgaccaagacgaattatctaaatccgatagatataaaataggtgatattcttaatgccataggcattaagaaggctacttatcatgacgagcgtaaaaggcttaaaaattatcaagacaagtatgcggatgtgaaaaaagaaatcattaagattactgaagatggaaaatttcgaggccggctaacctacggttatcgccgagtacaaaaagaacttttaaagttaaatatccatttgtctgacactgttattcgtcgtctaatggatgaattaaacgttcaagtatctatgtataatcgtcataagaatggcaaatactcttcatataaaggcaatgttggaagaatctcagacaacatcttgaaacaaacttttaatgagacattgccctacaaagtactacatacggacgtaacacaagtccgattgaaagataatagttgggcgtatatttctgctattacggatgaggctagtaaagaggttttagcatttaaaataaatgatagtcctaatagtagcttgataatatcaactctgaacgagttgattatcaagctacctgaatctgtgcaaccaataattcattctgatcaaggatggcattatcaattaaattactacactgaaaaacttaaaaataataatttcattcaaagtatgtcacgtaaaggaaattgtcacgacaatgccccaatcgaaagtttttttcatctttataaaacagaatgtttaaatggattcccaccttgcaaggatatttctgagctcacacaactttctaaagaatacgtcgaatggtttaatcatcgacgcatttctttgaaaacaaaaaatatgtccccggcagaataccgagaacatacattagttgcttaaaattttaattttgtctaacttttctgttgcacttcagatgactgggcctttttttaatgtttgaataggagataatcgactgacgacgcactctaaacgtgctctgtaaggcatccgcctccggttaaccctgagccgcaaacgattgctacgcaatcattcgcaactctgtattaatcctcagcggataatcgccttacgacgcactctaaacgtgttcacccagtcatctctttccggttagcgacgattgtcaaacgattgctttcagcaatcattcgccagtctagactaatcctcaagagatacccgactgggatcacactctaaacgtgctttgtaaggcatccgcttccggttaaccctgagccgcaaacgattacgttgtaatcattcacgacgctgtgttaatcctcagcggatattcgccttacgacgcaccctaaacgtgttcacccagtcatctctttccggttagcgacgattgtcaaacgattgctttcagcaatcattcgccagtctagactaatcctcaagagatacccgactgggatcacactctaaattttttctatcgctaggacttgtccttggtcggcgttgattgccttgtagtgggttacttggtaattggttggttctaggcgaattaagtcggcgattagatagtcgatttcttcttgagtttcattgaaccgaggatcaacaacgaataccagtaagccaccgcgattaagccgtgagagaatttgatgataggcagagattgtcgtgttaggcaatgtcacgtgttcaaaagaatcaggactgagtgcgcctaagctaaaaatggcggcttgcacttttaactcgggtggtaaggcagtgataatccgctcgtgtccttgattaagcaaagtaacctggtttgcttggtttgcttttgtaagacgatccgcgcaggtttcgatggcttctttttgaatttcgaaaccgtaaacctgaccaaaatcagcaacgcgttctgctaaaaataaggtatcatcgccatgccccacggtggcatcaattacgacatctccgggccgaattgcctggtctaatagaaaatgtgcaaatttagtgggatgatcaagtatcatgtgttaggactccttcagatgcaataatttaaaatgaataaaacagtaccatgaaccgccgagacacgccgttgctaataaaaagccagctaagacatcactcggataatgaacaagtacgtaaatccgactaaggccgatgcatagtgccaatattaaacaggtgccaatcgctatttttcgccaaacgcgttgacgaattaagtagtaaactaggatgcttaaagttccgaaaaaaagaagcgcccccgaagcatgaccgctagggaagctgtagccgcctgcgtagacaagatggtgaaatgggggccgtggtcgttggacgctcatcttaataaagtggttaagcgttgaaaaaaggaccatgttaatgactaaaaagctagctgctgaccactgtttaaagcccagcaaaccaagcgttacaatggtggtcaaagtcattatactatagggattgccgatcgacgtaatcgcaatgcttacagtatccatcaatggggaggaaagcgaccggatgccagttctgataagggtatcaaaatgtatagcccaagtggcatggtgcacaacgctgattaaaatgattagaaaactgattgtgccaagaatgaataaactagccgaaaatcgttttgtcatttttaagaaatcctttcaaaataagctgtaattaaagacagagaagattattaaatgatacaataattattaagcataagacaactaataaaagtagttgcgtgataggattgttttcctcctttattaatattataataaagttcaggtgaagctcaagttaattgtgccacagacaataataatggaaattcggaggcgttagaattgaaagagactagaaaacagcgaattgcagctcaaaaggtaagcttacataagcagaagcgggaaattagaattaagaaagttcgtaatgtgacgacttttgcaggggcaaccgtcttgatgggttcagcaattgcacctagtttttcgaatcgggccaaagcagccactgaagatgtgttaaatagtgcaaacaatgatgaccaagctacaacagctaatacagcaagtagtgcaacatcatcaacaactagttcaagcacaacgacaactgaatcccaatcaacacaacaacctgttgtaaaacctcaattgactgaaaatgaagcgacaaaggtggctacgccacaaccggcaccatctcaagcgcaaccaatttctggagtgcaaagtacgagtgccaatatcgcaaccgctggcgttgttatggcagtagctaattcaagcgcacaaaatttcatcaattcaattgctagttcagctcaacaattagcgggtggtaacgatttgtatgcctctgttatgattgcccaagcatcattagaatcaggatttgggagcagtggtttaggttctgcccctaattataacttgtttggggtaaaagggacttacaatggtagttctgtttatatgtggacttgggaagatgatggtcatgggaacatgtatcagatccaagctgcatttagaaaatatccttcatactaccaatcgttacaagattatgtgcatgtgctacggaatacttcatttggtgcaacgccttattatcaaggggcatttaagagccatacaagtagctatcaacaagccacacaatacttacaaggacgttatgcaacagcaaccaattatgcgtcaagtttgaaccgtttgattcaacaatacaatttaacgcaatatgacacgccagggaccaatactggtaacaataatgggggaacaacgactccaaccacgccaacgactccaacgacacctgaaaatgggacaaaagacaccgttagagccggcgattctgtttgggggattgctaatcggtatgggatttcaatgaatgacttgattagctggaataacatcaagaacaatatgattcacccaggccaagtcttgattgtttcaagtagtgcagctggcaacaacaatggtgggacgacaaacccaacaacgccaacagaccctacaacaccaacgaatccaacaacaccagctaatggtgataagtataccgttaaagccggcgactctgtttgggcgattgccaacaaatatgggatttcaatgaacgatttaattagttggaataacatcaagaataatatgattcaccctggcgatgttctaacagtttcaaaaaccgcaactggcaatacaaataacaataattcaaacagcaataacggtaatcagacttcaaacaagacgtatacggttaaatcaggggattctgtctgggcaatttcaaaccgttacggcatctcaatggctgacttggttaaatggaataatatccggaacaactttatctatcctggtcaaaaattagtggttagccaaggtgcaacaactggtaattcaaacaacaataatacaaatagtacaaatccagggcaagcttctgggaagacttatacggttaaggtcggcgattctgtctggggaattgctaaccgtaacggtatttcgatggcgcaattaatcaaggctaataatattaagaataactttatctacccaggtcaagtcttaaaattaacggctggcgctacaacgccaacgacgcctaacacgaattctgggaagacttatacggttaaatcaggcgatagtctttggtcaatcgcacaaaaaaataataccagtatcgcacaattaaaatcagcgaacaatttacattctgatttaatcttagtcggccaagtcttgaaattgaagtaagagtttggtatgctaagaacaattatttaacgttgagaaggattagtagttatcgttaagcgtttagagagcgtgtggttagtgtgaacacgtcgtttaacataacgaactcacctttgagttttctattgaactgatagtagatagaaacgtctgccgcgttaaggccagagagttgtccaatatagattggacagaacttaggtggcatcgcggtcaattcgtcctatggtataaataccataggacttttttattggcgttaagtgaattaaaaaagagtgtgtcaaaagtgtccatgcttttgaaagcacgttaaaaaaaggagtgtttgatatgacttacgatcatcgcgcagttgaacaaaagtggcaagcttactggcaatcacacaaatcgttcaaaacaacagaagataaaaataagaaaaatttctatgcattagatatgttcccatatccgtcaggtcaaggcttacacgttggccatcctgaaggttatacggcaactgatatcttggcccggatgaaacggatgcaaggcttcaacgtgttgcacccaatgggttgggatgcattcggcttacctgctgaacaatatgcgttggatactgggaataatcctgctgatttcacgcaaaccaatattaatacgttcaaacgccaaatcaattcattaggcttctcatacgattgggatcgtgaagtgaatacaacggatcctgatttctacaaatggacccaatggatttttgaaaaaatgtacgaaaagggcttagcttatgaagctgaagttgctgttaactggagccctgatttagggaccgttgtcgcaaacgaagaagtcattgacggcaaaacagaacgcggtggctatcctgtttaccggaaaccaatgcgtcaatggatgttgaagattacggcttatgctgatcgtttaatcgacgacttagacctagttgattggcctgaaagtgtcaaggatatgcaacgcaactggattggccgctcaaaaggcgctgaagtatcatttgctgttgaaaaccacgacgctcagattgatgtcttcaccacgcgtgccgacacaatgtttggtgtcagctatatcgtgatggccccagaacataaattagtggccgatatcacaacgcctgaacaaaaagcagctgttgatgcttatttaaaagaaatcgaacacaagagtgatcttgaacggactgatttggcgaaagataaaacaggggcctttacaggtgcttacgccattaatccagtcaatggcgaacggttaccaatctggatttcagattacgttctagcctcatacgggactggtgctgtgatggctgtccctgcacatgaccctcgtgattgggaatttgcgaagaaatttggtttaccattgaaaccagttgtggctggtggtaatcctgaagaagctgttcacacagaacctggtgtgatgattaattcagatttccttgatggtttagacaaacaagcagcaatcgacaagatgattgattggttagtaacgcataatgctggtcatgaacaagtgagctacaagttacgtgactggttattctcacgtcaacgctactggggtgaaccgattccaattattcattgggaagatggcacaacatcagtggtgccagaagatcaattaccacttgaattaccattaacaagtgatatcaagccttcagggactggtgaaagtccacttgcgaacttaacggactggttaaacctaaccgacgaaaatgggcgcaaaggccgtcgtgaaacgaatacaatgccacaatgggctggtagctcatggtattaccttcgttatatcgatcctaagaaccctgataaattggctgactttgataagttgaaagactggttaccagttgatatgtacatcggtggtgcggaacatgctgtgcttcatttattatatgttcgtttctggcacaagttcttgtatgatatcggggtcgtgccaacgaaggaaccattccaacacctatataaccaaggtatgattttaggcgataaccacgaaaaaatgtcgaaatcaaaagggaacgttgttaaccctgatgatgttgtcgatcgctttggcgctgatacattacgtttatacgaaatgttcatgggcccattagatgcttccatttcatggagtgaaaagggcttagccggcgcgcgtaaattcttggaccgggtatggcgtctatacacagaagaagataccgacgaaaacgaccaactttcaagcaagattgtcgctgaaaatgatgaacaattgaagaagagttacaacgaaactgttaagaaagtgacagaagatttcgaaagcatgcactttaacgtggccatttcacaattgatggtcttcatcaatgatgcttataaagttgacacactaccacgtgaatacgctgaaggctttgtgaagttattagcgccaattgcaccacacatgatggaagaattatgggcaatgcttggccatgatgactcaatcagttacgtggactggccaaaatttgacccagcagcattggttgcaaatgaagtggaagtgatcttccaagttaacggtaagttaaaggccaaagtaacagtggctaaagacacaccgaaggaagaattagaagcgatggctaaggcaaatgaaaaagtagctgaattcattgctgacaagacggtgcgcaaagtgattgccattccaaataaattggtcaatatcgtcgccaattagagtgcgtttcaaaaagagtgggttcaagctcggtcaacttttgagcattatcagagggaagcgaataagcgacgtagtcgattgtttgattcactgggataagcgcagaaagttagcttgaaaagcacgtttcagacaagagtgcgtttggttgcggttagcaactgagcattaataaaaaatttcaaataatccaggttttaggattatttgaaattttagattaagcggaagttgttgcaaccaaaaagcatgtttcaaaaaagcagttactgtttctcgcagtaactgctttttcttatttaaaattaatatttaggggcctaattatccttcaattaatataagggttattctaaagcgcttttaagatgataaaaagatgagagcgactattgcttttgggtgttttttattatacgatgataagtaaatttagattctggggttaaccaataatgatgatgctaaaatagaggggtttgaggactatgaaacgaaatttaactgcccgtcagatgcagatgattgcacttggcgggacaattggggttgggctttttatgggggccaacacgacaattaaatggacggggccgtctgtgctgattgcgtatgggattgctggtttattgctgtatctcattatgcgtgcacttggagaaatgctgtatgttgatccagatacggggtcctttgccaagtttgcaacggaatatatgcatccaatttttggttacttaacagcttggagcaatgtcttccaattcgttgtcgtggggatgagtgaaatgattgccatcggcggttacttagaattctggtggccgaacttgccgggctgggtaccgggactggtcgcgattacgttcttatgtgcggccaacttaatttcagtcagcatgtttggtgaattggaattctggtttgcgttgattaaagtcgtcacgattattctgatgatcgtggcaggccttggactcattgtttttgggattggaaaccatatgcatccagtcggcattagtaatttgtggacgcacggcttctttacgggtggctttaaaggcttcatcttcgccttggcaattgtcttggcatcatatcaagggattgaattgattgggattacggctggcgaggctgaaaatccacaatcaacattggttaaagcaattcaatccactgttgcgcggattttgattttctatattggggcgattttcgtaatcttgagcatttatccttggaatgaattgagtcaggtcggttcaccgtttgtgcaaacctttgctaaaattgggattaccgctgcagcatcaatcattaactttgtagtgattacagcagccttatcgggtgctaactcagggatttacagtgccagtcgaatgacgttcacattagccaataatgggcagttaccaaaacgattcttgaaattaaaccgccacggtgtcccattttatgcggtcggggcgatttcattagggattttaatcggggtgattttaaacgccattttaccacttgtttatccaaaagctggcaatgtcttcgtgctcgtttatagttcaagtgtcttaccagggatggtgccatggttcgtcattttgatcagccaaattgcctttagaaaacaacacgctgacaagatggcacaacatccatttaagatgccttggtcaccctattccaattacatcactttggcaatgttgtgtgtgacactagttttcatgttcattaatccggaaacgcggatttcaatcattgttggtttaattttcttaatgatcatggtggttatttatttcgtgaaatttggtcggcaaaaatcatgacaagcaaaaaggcagcctagttggctgcctttttttattcgattggattgattcacccgctgtttggcggcgatcaatgttatcttcgccccataaacagaggagatttaagattttattgagtgactgaccgtattcagagaggctgtattcaacgcgtggcggaatttcctgataaattttacgattgatgatgccatcgttttcgagttcgcgtaattgtgcagtgagcaccttttgggaaatctttgggatgcgttgtaagagctcgcttgatcgccgtggttggttgcgcaaatgacaaagaataacgggtttccatttaccgccgataatttccatcgtagcttcaacgccaatgttatatgttttctcattcatttctaattttgattcaccttttcattgtgataagactcaattattacttttcagtaacctactgactaaaaagtgcgtgattgtgaaaatcacgctcctattgaataatatagtacatcagtaaaaaaagtctaataggagtgtggcagtatgagtagtaaacaacgggcgaacctcacattactagcattggcaatcagtgcttttgcgattggttcgacagaattcatcagtgtcggcttaatgccattgatgattaaggattttgggattacgatgagtcaagcaggactaaccgtatcgatgtatgctttgggaattacgattggggcaccgattttggcgattttaacaagtcgttggccacggaaaaatttattgttggggattatggttgtctttatcattggtaacttgacggtcgcttttgcgccagtcttcgcctgtaacgccgattttagaatcaaaaatgggttggtcaccaaggggcgttgtgatcatcttaattatttatggtctgatggtggcttttggaaatacgttgggtggcaaatggtcaaatcaccaaccgttgatggcgctattgaaaatgtttgttggcttgttagtgaccttgttgctattcatgttaacgttaaatgcccattggttcggtttaattaacgttttattgatgggctttttcgccttcatgaacgttccagggctccaattatacattgtgcagttggctgaaaaaatcacgccaaatgatattccattggcttcggctttgaatatctcagcctttaatatcgggattacgataggctcattagttggcgggcaagcatcggcagcttggggcttagacagtacaccaatctttggcggtatcatggtttttgtcagcattctgttgacgtggtatttgattcaacaaagtaaacaagctaaataatgagatggcagagagctccgcgaaggcggggctctttttttgaaacgtgctattggcgctagatttctgcgcctaactacaaaacgggaatcatggccgagtacgccataattcccgtttttaggttagtgctcaaaatctgggcaagcgctaatagcactcttattgaaacgtgcttctgatgacaacaacttccgcttaatctaaaattcccaataatcttaaaacctggattattgggaattttgtattaatgctcagttgctaaccgtcatcagaagcactctttttcataaagttttgttaaaggaattgcaaggcttggggcaatcctctaaaatggtaggaagatgctttttgacgtttaataagggagttatgggaaatgaccaattcacctgaaacaaaggcgacggatagatcttcacaaagtaagatgttacggggctccgcttggatgaccgctgggagtattttctcgcgaattctgggcgccgtctatgtaattccgtggccaatctggtttggcgcgaatttcttacaagccaacacattatttgcaaaaggataccaaatttatagtgtctttttagtgatctcgacggctgggattccaggggcgctatcgaaacaaattgcacgctataacgaaatgaatgagtatggcattggtcagcgtcttttcagaaagtcgctgattttaatgttggcaatgggtgttttatcagcgctcgcactctttgcgttagcgcccgttctagcagcgggtgatccgcggatggtaccggtcttccggtcattaagctggccgctattgattattccattgctcagtattatgcggggctttttccaaggctatgccgaaatggcgccgtctgcgatttcgcaatttattgaacaagcagcccgcgtgctgtacatgaccgtgaccgcttttatgattatgcaagtgtttaaaggcagctacgtggatgctgtgacgcaggcgacatttgccgcattcattggggctgctgccggcttgttattactgattttctattatttgaaacaacgcggtcgcatttcagagttagtggccaatagtaacaacgaattagaagtgtcaacgactgacttgttaaaagggattgtgcgccaatcaattccattcatcgtaatcgacgcaagtgtcaacttggtctatatcatcgaccaatacacgtttaatccgatgatgcatgatttcgtggttgccagtgatcatcagttgtataacttgtatgctttatttgcagctaatgcgaataaactgatttcaatcaccgtttcactcgctgctgccatggcggtcacggcgattccattgatgtcagctgcgcatgtgcggggcaatcaaaaagaattgcaacatcaaatcggcagtactttgcaattattcaacttagtgatgattccagcggcatttgggatggcggcggttgccggtccgctttacacgttattctacgcgcatgatacgcttgggattagtgtcttacaattttcatcttacatttctattatgctcggcctctttacggttttaggcgctgtcttacaaggcctctatcagaaccgcttggcattgttttacttattcatcggattcatcgtcaaaattgtggcgcagtacccagcgatttattttttccgtgtctatggcccgctagtatcgaccggcttagcctttgcgacaagttcggttttaatgattgcagcactgcatcgctattatcactttgcattacgcaaaaccattcggcgcttaatcggcgttttaggcttctcattggtgatgtatttggtaacggcgggggcagtcaaggggttataccttgtctttaacccgtacagccgtcttcagagcgttctagtcttaatgattagcgttggcctaggtgtggctgtttacgccgcattggtgcttaaatcgcgcttagcggactatgtcattgggagtaacttggatcggtttagaagaaagttgagaatcaaatgagaattgatcgctttttaagtcatatgaatgtggcttcacgcaaagaattaaaggtactttttaaagcgggacgcgtgcgcgttgatgggactgtggtcaaagatgcgaagttcaaagtgaacgaggcgaccgttgtctatgttgacgacgaacccgtgcgttatcaaacctatttttattggctgatgaacaaaccggcgggtgtgatttcggcgacgactgatccccagaaaacagtgcttgatttattggcaccagcggacttgcgggatgatctgtttccagtggggcgattggataaagatacaaccggcttattattgttgacgaatgacggcgatttaagccatgccttgttgagtcctaaaaaacacgtcagcaaggtttatcgcgccacgattgccgggattgtcacggcagaggatcaagcgcggtttgaagcggggctcgtgttgagtgattttactgcacaaccagcacagcttgaaattctgagtgttgatgaggcgcaacaagaaagtcagattaccgttgagattcatgaaggtaaattccatcaagtgaagcggatgtttcatgcggtcggcaaggaagtcttgacgctagaacggcttaagatgggaccactggcattgccagatgatttagaccgtggccaataccgtgcgttgacagatgcagaacttgcattacttaaagcgaattaataaacagcagccctttcaaaaggactgctgttttttttaagattgatgaatcattttagccatatagtgtggtaaggtctgaatcacttggctaggaagtgtgacgtattgggttttggcgagttcatcagcaatcgcactgtgggtataaacagcggcacaaatcgtctgatagtgggtgccaaattgaccacagaatgcggcaataataccagtcagtgtatcgccgctaccgccagttgccatggaaggcccaccgatggttagttgctgaacctgttgctgatgatagacctcggtgtgatgttttttaagcactaaagtcgcgtttggataagcagcgagtgcggcttgattagtagcaaccgtttgctgcttgattgcaacaccgctgaggcgcgcccattccatttgatgcggggttaaaatgagttgcgtattcgggatcgtcagtttttcatgtgcgatgattgatagtgctgaaccatcgataatcagtgtttgtgttggttggatggtttgtaagatttttctcagcagttcaacggcaaacgaagtaatgccaagaccaggtccgacaacaacgacatcagcagcctggactgcagacgaccactgcacgaagggttgttgataatcaatgaacatggcttctggtaagcgcgcgtgcagtccgctgagaacacttaagtcactagcaacggaaactaatccagcaccagcataaacagccgcagaggcactcataatcgcagcaccgccgtattgctgactaccaccaatgattaagacgcggccaaaatcgcctttatgactgatggcaggccgtgcctgcaggaccgcacgaacggttgaatttgtgatgacttgcatctgaatccctcccttatcaactattattataagcgaaatattaataaatgggtattggcagggctctgtaacactggtacaatagtcttgtagcacaatcgcccgtgtggcggaattggcagacgcgcagcgttcaggtcgctgtttgggtaaccaagtacaggttcgaatcctgccacgggcattatggattaaaaaaggatcgctatcactttagatagcggtctttttttgttcaaaaagtacatcgattattgattatttacctcattatgactggtttagccaatggattagcgacaattattagcactattcaaaaaaagttgcatcaattttaaggaattaaaccattagtagaaaacgatagctttaaataaatattttcttatcaatataattattatttgaactataaaaacggctgaaagctacaagctgtaaactgcatcgcgattaaaaggtcatttaattaatttatataatataatgcctgtggagcagagcaggattactagttcgcatattgtaggtcctcaaaatagatagaaggagtaatgcttattatgaataatcaattattaatgctcattaaatatcgtaatattttggatcaattatttgtcacagttttgcaaaatgttgacttatcactcgaacaatatttgttgatggaaaaaatggatcgtgaaaaagaagaaacgcccggcaaccttgctgcttgtatgggcgtttctcgaccagctatttcccgccaatgccaatcgttgggtgaaaaaggattaattgaacgggctaatgtggggagttttattggtgatagtcgtaaagtatactatcgacttacaaccaaggggaaacagttattattaaagattagactaaacagtaatgacatgattgatagtttggattctggatttgttactaccaattgggatgaaattgataaccaaattgcgctaatgtccgacgcggttaaaagaacattcaatatcaatgagattcaaatcttttagagagaccatcggaatctgaacgggggagttatttagtttagcgcgtgttaatgggcaggatcgaagcgatggatgtcgagtatgattatttttgaatgtaaccggttgcgatgaattggcataaacggtatattattaaggtatctaagggataggagagaactaagcatgacaattaaattaatcgcatccgatatggatcataccttattaactgagagtggccagttgccaccaaactttataccaaccattcagcaattacatgctaaaggggttcaattcgcagctgccagcggtcgaccaatgtacacgttaaagcaaatgtttcccgaacttgctgacacaatggtttacgtcagcgataacgggggtgcaattggttatcaaggtgaaactttattcaaaagtttattgccgttagctgattaccaacggatggtccaattcgttaatcaaacgccagatgggattggcgtgatttgtgggatggacgcggcgtacgttgaaacacaatatcgagattatgacgcgactttgcggcaattctatgccaacattgaatatgtacctgatttaacgcaggttagtgttgaagccaacaagtttacgatttatttcccgggaaaagatagtcaagcacagtatgaagctgttttcgcacccgaatttgaaccggcttattcagtaacggttgccggtgttgaatggatcgatattatgaatcaaggcatcgacaaaggccatgcaatgcgctttttggcggattatttcaacatcacgccggcgcaaatgatggccttcggggatacttataatgataaagaaatgctgcaaaccgttgaacatagttatttgatggggaatgctgccgatgatatgatccaatatgcgacttatcgtgccgacactaatgagaactatggtgtgttaaaggagattcagaaattactttagtcaaccaatcgtagatgaattggtaatgctgggtagcatctgtttctaataaaatttcatgcgctgtatgaggtagaatgcgcaccgttgcgttgttaacggtgcgctttttgaattggttcgttaaatgccgcgcgcggcgaccataaccgccagctggatcgtcggcgccactcattacgagaactgggcgggattgtaaggcaagttgccaatcagcatgccgagttaactcagtgagggtgaagagcattgcaaaaccgctatttgaaaagacgtagccacacaatggatgctgttcgtaggccgccacgtttgcttgattgtaacttaaccatgaaaaaggtcggtgagcatcaaatcgtttaggatagaccccaaacgccaagttattccagatagtaccggggcgcttagctgcaatggcgccgattaatttaacgattggtaaggcgggtttaagaatgaagggtacatcgataacgcccatgaagatggctccagtaatcggcacttcagtttgcttaacatattgtgtcgctagcattgagctcattgagtgtccgagcacaaataatggtagctctgggtattcctcgtggacaatgccaccgattaaggtacaatcgttgactagcgtctggagcccgtttggcccgaaataaccgagctcatcgttggactgaacggagtggccttgcccaatatgatcgtgtccgatgacgataatcccacgatctgctaagaattgagcgaaagcatcataacgttcgatatattcggccatcccagttagaatttggacaactgcgaccggtttttggattggaaaccaagtcacgacatttaaagtatggattcgatcagtagattgaacggtcaatttttgcattggttagcgcctcccgaaaaagataacgtactttacgattcattttagcagaaacaatctagagataccaaaagggcgccaaacaactttaaccgttgtttggcgtcctttttagtcatgcttaaagttgcacatcatcgttaattcgtgttgcgcgtgagaagtatttcgaatagaagcgactgataattccccaatagtaaaagatgagggctaatgcgctaattaagacgaaatcgagtgggtaaggaatcaggttaattccgttgaattcccgactgcccaagaatgaaatcagcgaaagcaatgcgagatagataattaaccataagcttcctttgaattgagcccaagtattttcccagtgaatccgatactcatagtagaaataaaatggtaagccaagcataatgacgccaatcaccttaatggttgttggccacattgcccagtaagttgccaaactggcaaggacaaaggataatggcgacatgattttcatccaaggtgactgaacagggcggttcatatcaggggccattttacgtaatgacatgacggtgaccgggccggttaaataggcaatcaacgttgcggttgaaatcacgctggctaacgttccccaacttctaaaaattgaaacgagtagcatgctgacgatggcgttaatgaccatcgcaatgcgaggaatattatattgttcgttcatgcggccgacaatcggtggcatgtgtttgttctgctttaatgctgctaatgtccgtgcacatgaagcgacaaaggaaacgccgtttccaaagggtgaaacaaacgcatctaagtaaagtaagacggctaaccaatggattccaagtaaaatggctaagtcggcaaagggtgattggaagtttaaaccgtgccaaccgactttggcgagcaaggcgggtgaaacagaaccgataaaggtaatttgcaagagtagataaatcacaatactgatcccaagtgaaattgcaattccacgtccaatattccgtttagaatcacggatttcactgccgacattgattactgtttgaaaggcattgtatgaaaagataatcccagaaatcgaagtggctgcaaaaattttggcggaaccatagggcataaacgtcgccattgaatgcccgaagttgccagtatggaaaccagttgagactaacataataatggttaataatggcacacctaatttaaagattgcaatgaagctggtaaaacgggtcaagaatttaacggaccagaaatttaaaagggtgaagacgatgataaaggcaaagacgacgagcaagccacgattcgaaatttcagcgtggtgcataaagtgattcgtccagttagcccacgcccatggccaagaactcatatactggacagcagcgacggcttcgattgggataatcgtgactaatgatacccaattggcccacgctgcgatgaagccgagtaatgaaccgtgactatattgggcatagtgactcatcccgccactttcaggaaacatcgtcccgagttcaacgtaattaaaggcaattgcaccaatcacaattgcgccaacaatccaagagatgatggctgctgggcctgccacggtcgttgcctcccatgcaccaaacagccaaccggaaccgatgatggaacttaaaccgagcatcactaggctaaataaactcattttgttcttctctatcataaagacctcctgtgtatggtgtgccattatagcaaccatcaccgttggtttcaaattaaaaatacggctaaaatgagtcgtgaagtctatcaaattaacaatggtaacgccttctgaattaattattaacaattaaaaaaaccgtcacaaaaagtgacggttgaatagttaatttaagtcaattgccccgttgaatggcatccgtttgtttaaaaagatttaatttacgatcgttccagaatgtttcagacatatcgcgatagaagatcgcagtctgacagcctgggcaacgtttgataccatattcaattggcgcctgacatgcagggcaatgaaatgcggttgattcaggaattgtattttgcgaatcggccattaaaaggactccaatcaagttgttatcaatagtataccgcatacatacgctatttgttaagcgtttaaaccttttttttaaaaaaatatgcacaaatcggaaataatatgctatactatatcaagtaatgcgagtgtagtttagtggtaaaactcaagcttcccaagcttgcgtcgcgggtccgattcccgtcactcgcttaaagattcatgcaaaagaggttgcaacagaagaaattttgttgcaacctcttttttattctctgaaatttaatcctcggcggatacccgacttacatcaccctcttttcgttatcagacctaaggccgattgtttgtttaaaggcgctctgataaagtatatttattatctatcgactaaaaactcgtgacacttacgagcaatctaagtagtgggagcgtacgacattgacattattagagattaaagatattcacaagtcctattatatgaacaaggctgaatttaaagtcttaaaaggcatcaatttaagctttgaccgtggcgaatttgtttcaatcctcggggaatcaggcggcggtaaatcgacgttgctgaacatcatcggtgggttagatcaccaatacgatggggagctcatcgttgatgggacatctttaaagaatgcatccgaaaagaaatttgatgcttatcggagtcaaacgattggctttattttccagagctttaatttaattagtcatttgactaacttggaaaatgtgatggtgccacttgaaatgactgatctatcacataaggaacgggttgccaaagcgaccgccttattggaacaagttggcttgaaggaacatatccataaacatcccaaccaattgtcaggtggacaaaagcaacgggttgctattgccagagccttggctgctgatccagatgtcatcattgccgatgaaccaacgggtgcgttagatagccagaatacggccgagattctcgaaatcttacaaaagattgccgaagatggcaaactcgtcatcgccgtaacccattcacaagccgttgctgaccacggaacacgggttgtccacatggttgatgggcagattgattatgacaagcaattaaaaccagcttacccagctccaactggtccggtaattaagaagagtagtccattaagttttatgtctgctttcaaaatggcaatgcaacacatgcgctacgatattaaacggaatttgctcattatttttggcgcgtccattgggattttctccgtcattttaatgctaggcttgggtcaaggggtgactggctatattaatgatcagatttcatcgcaagttaatccaaatacgattcagattgcaagaaacctcacgcgcaaacagattgaagccggtgaacaaggtaacttagctgataaggatatcaaccgccttaataaggtcaaaaacgtgacgaaggttgaaaagggctactacatgaatggtgtccaagtgcactatcaaaagaagagtgaaacagtccaaatgttccaaacgtttaataaaaccgaacgtgtccaagatattaagaccgggactaaacctggggccaacgaaattattttaacgaaggcaatggctaagaagttagataaaaattacaagaagatggttggtcggacagtaaccatttacgtcaatgccattagtaaggatcaacgtccagttcaaatgcgccaagatgtgaaagtttcagggatcatcaattctgggactgaagccgtcacatatggcacattagccaagatgtaccaagcgcaaggattagagtttgcacccaactttgcagcagtcacggttaataagacccaaaatgttaaagccgttcaaaataaaatcaaaacctacactagcaaagtcaacggtaagacacaaaaggattaccaaatcacaggggttggtgcgatcctcgattcaattaacacttacttgatgttagccttctacgtcttagctgggattgccgggatttcattattggtttcagcaatcatgattatcgtggtgctctacatcagtgtgtcagaacggacgaaggaaatcgggattctacgcgcaatcggcgcccgaaagaaagatattcggcacttattcgtctcagaagccttcttgattgggttattatcaagtgttcttggtgccggcattgctggccttggacaattgcttgtcaatacgttggcccaaccattaacgcatatgccaattgtggcaattaccagtggctacgtcctattcgggataatcatcagcattatcatcagtctcttagcggcactagcaccttctcgtaaggcagctaagttagatccaattgaagccctcgcggcagaataattgcgcttgaaaagtgcagctaagttctatatactagttatcaagttcgaacagtcaaaagaatagcatcaacagcgatttatagcgagctcacagacggtgtaaggtgggtaatcaagttgacgcggcgcgcttttggttgaacaattgcatactattgagtggatcgattgatcaatcagagtggtaccgcgggaattctcgtctctttcatttatttggaagggacttttttttgttcacaaatattaggaggctatcaacatggattttaaacaacaagtcaccactgccttaatgggcgttttaggggacagtttaccagcagataaagtagcacaactcattgaaacaccaaaaacatcagacttaggggactatgcttttccaacgtttatcttagcgaaaacattacggaaagcaccccaacaaatcgcccaagacttagtcgcagaaatggatcaagccggctttgaaaaagtgattgccaacgggccatacatcaacttcttcttggataaggctacgtttagcgaccaaatcctcaaaaccgtcttaacgcaagccgctaattacggccaaagtgacctcggtaaagggggcaacgtgccaatcgacatgtcatcacccaacatcgctaaacccatctcaatgggccatttacggtcaacagtgattgggaactcaatcgccaagattttgacaaaagtgggcttcaacccaattaaaatcaatcacttgggtgactggggtactcaattcggtaaattaatcgtagcttataaaaaatgggggagtgaagaagaagttaaagaagacccaatcacgaaccttttgaaatattacgttaagttccatcaagaagacgttgaacatccagaattagacgatgaagcacgggcatggttccgtaagcttgaagccggggatgaagaagcaacgaagttatggtcatggtttagaactgaatcattaaaggaattccaaaagatctatacgatgttaggggtcgaattcgactcatttaatggtgaagccttctataacgacaagatggacggtgtggtcaacgcacttgaagcaaaagggctcttacaagaaagtcgcggtgctgaaatcgtcgacttaacagcttacaacttgaacccagccttgattaaaaaatcagacggcgcaacactctacatgacacgtgatttagccgctgcgatgtatcggcatgacacatacgacttcgtgcaatcattgtacgttgttggtggcgaacaacgggaacatttcaaccaaatgaaggccgttttaaaagaaatgggcaacgattggtcggacgaaattcaccatattccattcggcttaattactcaaggtggtaagaaattatcaacgcgtagcggtcgtgtgatcttattggaagaagttttaaatgacgccgttaacctagcacaacaacaaattgaagccaaaaaccctgatttaccaaacaaagaagaagttgcaaaacaagtcggcatcggtgcggttattttccatgatttgaagaatgatcgtttagataattttgactttgacttagaagaagttgtgcgtttcgaaggtgagacaggtccatacgtgcaatacacaaatgcccgtgcccaaagtatcttgcgcaaggccaaccaagaagtcgcaatggacgctgacttagtcgtttcagatgccaacgcttgggatgtcttgaagatgctcggtaacttcccagacgtgattgtgaaagccagccaagaatacgaaccatcagtgattgccaaatacgcattacgcttggcaaaagccttcaacaagtattacgcaaactcaaaaattttggcagacgacgatcaaaaaaatgcgcgtctttcattagtgaagagtgtcagcacagtcctagaagcctcactagacttattaggcgtacaagcaccaaaagcaatgtagagtgcgtttaaagcggtttgactctgagcatttgcctaatatcgtgaataagcgacgcagtcgattgtttgcgatatgtagcaaagcacaagagtcagctttaaaaagcatgtttaaaaacagagtgcgtttgaaacggtttgaccttgaggattaacctaaaaatagcgattatggcgggttttagccataaccgctatttttaggttaaccggaaaggtcagtttcaaaaagcacgtttcagatcagagtgtgcaagcaggcggttatatttgagcattaactggatttggcgaattgacgatgtcatcgtcgatttgataaatttggttaagcgcaggaatatgcctggagcacatttaagccacccgattaaatcaatctggtggcttttttatttttcgaaaaattctaattcgatgacaaccccgccaacttccgttatagtaatcttgaaatagtgggggagggttcactaatggtattagtcttaaaacgccagattaaagggattccggttttggaagtggtcgctgacgaacaacgtcatcagccattaccactcgtgatttactatcatggctggcggtcagcaaaagaattggttttaacgcaagcgcgtaaactggctgaagctgggatgcgcgtggtattaccggatgcactgaatcatggtgaacggctgcaacctgtttcagagattccgtcatggactttttggcaaagtattcaaaccaaccttgccgaattcagtttgattgttgattactggcaccaacttaatttaattcaagctgaccgcatcggcgtcgggggtgtttccatgggtgggatgacaacggcggcactcttaaccaagcatccagaaattaaagtggcggcttgtatcatgggctcgccggcaccgctagcctatgcgcgcttagttcgtgaaaatatccgtgcgcatcagttagcacaacctgacgatctagggttattgacaagttggttaacggcctacgatttaactgaacagccgcaggcaattgctcaacggcctgttttattctggcatgggacagcagatgaacgaattccctatgaacaagtagcagcttttgaacagcagattaaaggtcaaacttatgccaaaaacgtgacatttttaacagcaaatggtgaacgccatctggtgaagccagcgctgatgaacataattacagatttttttagtacgcaactataaaataaatcatttttaaaaagccaacgttaaattcttagctgcgataatccctttatggttgtcagatgaaatacaataattcatctgacgactatggagggatttttgtatgcctaaatctaaacatacggtactcgagaaattaacaatcttagatgaactgacccaatcaaaaattggactgggtccggtggccaatcgccatggcattgatcataagacgctagagcgttggcgagatcgatactcccgtgatggaattaatggtctaaaggaggctaagaaaaacaaacactattcgaaggaactcaagctcaaagtagtccacgcatatcttataggcgaaggcacctttgatgaacttgcaaataagtttggacttcgtggatcgcagcaagtcgtagactgggtaaacaagtataatgggaataaacctttgacggcgtcgccgtccagaaagcaggttcccactatgagccgtaaaacaaccttggaagaacgcattgaaattgtcgagtatgtcaccaagctgaatcattcatacacagaggccgctgaacgcttccaagtctcttatcaacaagcacgttcatgggtgatcaaggccaatcacggcggctatgaggcgctcgtggacaaccgtggccatcacaaagaacaagctgagctgactgaactcgataaagccaatcttgaaatcaggcagctcaaagcacagctcgcagacaaagagcttgtggaggcattcgcaaaaaaattgctggaaatccagcgcagggggtgagtaaacaacatcgactgtcttacttcgcaattaatgaggtcagtcaaggcaagcgtggtgcaatatctacgctgttggccgttgtcggtgtaagccggcaggcttactacaaagggttaaatcgagaagaaacagcttgggaagcccgtaatcgtcagctcaaggaacggacacaatactggtttgattttcatcatcaaggtatcggtgctgggaaccttttattgaatcttcaacatgatgacctaattgacttccccgttactttcaggatggtacgtcgtgtgatgcgggagctcagcttgacatgtcaaattcgggtcaagaagcacagtcgacataaggagaacgaacagcacattcaagacaatgtgctcaatcagaacttcgacgtcgacagtcctaatcaggtctggttgtccgattcaacggaactgacttacggcgtaaataataagtataaggtgcgcttgagtggcgtccttgatctctacggccgacgtttgttgtcctacaatttgagcactactgaaacgtcagcagcagaaatcgaggttttccaacgagcctttgaggcttctggcgacgtccacccattggttcacactgatcgaggatcagcctacacctctggtgccttcaacaactttcttggtcgttacaacgtcacacgtagtatgtctcgaccaggaacaccatacgacaacgcaccgatggagcgctggtggaacgaattcaagttacggtggatggctcgccatccactagcaaagacttgcgaagagcttgtaagactggttgaggaaggaatcgaatatttcaatcaccacaaccgctcagcacaaagaaacggcctcaccccagatgaatactggagtgaagccgcatagagacagattcaactttatattatttcatttgtcaacttgacagggcctagtgcaagcgttggcctttttgacgtgttttatttcttggaatattaaaaaaataatgatttataatgggaattaaaatacgaatttagacgactttttcattggtttggtatagcgggaagaatgctttttattatttgtataatacgtgttgtatgcttatcggtctaattgtttatcgcagtaatatgaattttatgtgtcgataatatttatggaaaccattatcgttttattatagtcggagttggtgaagcgtgttaagttaaatgtgttccaaaaataattttttaggagatgagactatcaaaaaagtagtaggtattttagcgttcggcattttaacgaccagttgcatgagtgttttacaagaagcaagggctacgaccagttctaattaccaaagtaagcaaagtgaggtgcttgatgatagcctccaacctaaggtgaggcaccagaagggtgtaacacgttcagaaaaggcgccatattcaaaactgtatattggccgcggtgatgttaataaagaattggctcggcaacaaagggccttgagttattcaagcttagagccttccggattatacgccaaaaaaggggacgtgctgacggtgagcaaaacgggtcaagacttgatgtcgctgacgattggctcgcctgagcgagatgttcagaaacgatatccgctcgtaaatggggtgacgactattacagttgaaaatgatggccctatttatgtgacgaatccaaatgattcaggcggtactagggtgtcaatctttgatgccactggtgaaatgccgttctttgatgcaaacaagacgagtgtcgaagattttaagaaacaaatgactgaaatgacagacgcaaaagatgttcaacttgttagtgatcgtgctttaattactgtgagttatgagatggcaaagaaatatttgggggatcccaaagcgttaatggctaattatgaccgattcctggtcgctcaagatcgagtttcagggatcagtaatgaaggtcggccggttaacttttcagatcgccatttacaacatttcttagaatcgccatcgtattatatgtatgcgacaaacgaatacatgggttttaaaggcgatgtagctatgaaaagtttattagaacttcaggatccttggggaatctggcatgaaagtggccatcagagacaacaaaaaccatggagatggagagaagttgtcgaatcgagtgttaatatttattcgttagcagcgcaaaaagaaatgacgggtgcgatgcctgatttagataattggtagattgtaaaattaatatctttaaggatcagaaattaattgttaagaaaaatggcaaggtgattgcggagttggttgataagaaaacagttaatgggacagttattaatgatatttggcagattgatgaaccacttgatgtaaccgatatgattaccattgaacaacaaaatgccaatgggacttataagcggtttaatcaatcgatcagtgggacttcgcttagggaacaattggaaaactatttaaacacaacaaaaccaatcgagacgattctaacgcaagataaattaaacaatctgcgccaacaggttgatgcactacaacctaatactgataaagaagaattaatggagatggttaaaaagctccaacaaagatatttagacgtattagttggtaaaattgaactgaattcagaatcagaacttgtggtgacatttgctgatggaaaacttaaggaatatgacgatttaaaagttcaagcggatacacatacgattgctcaagtaacgaatggtaagccgaatgttggtcgtgttgaaggaaatcaattgattattccaaaccaaaaagatgccactgcgatctcgatagcggtgactttaccgcatggcacttatctagtgaaagtgattagtcaagaggtgcttgttgctagaaagttagtatcggatttatttgaacaggacggtaagttgaaaccaaatgtgacgcaagaagtgttagatcaagcatggcagcaagtaaatcagttaccacaagacagcaaggaagcgctagcgaaaaaaatgaaggaggcacaacagttattcttgaatgcgcttattgcggatgtaacgcttaaagatgccaaaatgatggtgacttttgcaaatgacctatttaaaaaatatacgattcttgtcatggaagaagaccacagcatagggacaatagtgtttggccagacctttgagggagaattaagcggcaatgtctttacaccaatgcgtttaacagtttcgggtaaaacgtatcgggtaaacgttatgcacaatagcggtacctatcaagttaaaacgttggtagctgattgatgggttatagcgaaaccagataaactaatctaaaggcttttttatgaaattaaattgaaatacaaaattgatatctatcaataaaggctgagcaatagtgctcgcctttttatttggtttcaacatttgataatccccatttccgtggtagtctgtatataaagcattatcagatggaggttaggcaaacgtggaaaatggacgacttagacgtgctagtcagtttaataagacacggtttcgctttgtgggcaaagggttattagttggggcgttcactggattggtggtcagtttatttcgcttagcgattgaaaaaggactggcctttgttatcactatctatcaagggttaaatgcacacccgtggtattgggtgccattggttggtgccaatttattgattggcctgcttgtggcacaattattaaaaaaggaaccgaatataagtggttcggggattccacaagttgaaggacaattggaaggtgagtttgatttcaattggtggtcaatcctgtggcgtaaatttgttgggggcattttaagtattgcacctggcttattcttgggacgagaaggcccatcgattcagctgggggctgccgttggacagggggtcgccgctaagttgttaaatcgcggtgctgatcgtcggattttaatcgctagtggggctgccgctggtttatcggctgcgtttaatgcaccaattgccgggacctttttcgtactagaagaaatctaccataacttttcaccgttagtttgggtgacatcgcttgctagcgcaattgcagcgaacttcatttcattaaatttttttggtttgacaccgacattacatattacgtactcccagagtttgccaattaatcagtattggcatttgttgatacttggtgtggtattaggtctgttgggatacgcttatcagaaggtattattgtggttaccgcaactttatgtgaagatcccgctgccaaaagcgtataccggattagtgccattattatgtgttttgccgattggttatttctggcccgaaattttgggtggtggcaatggattgattgcacaccttggacaaaatttaccgacaatcagtgtggtggccggtctattcctattacggtttgttttttcaatgatttcatacggttcaggattacctggtgggatttttctaccgattttatcactaggagctttaatcggtgccctttatggactcataatggttcaacttggttggttagcaccagtttatgttcccaacttaattatttttgcgatgggtggttactttgccggaatcgggaaggcgccatttacggccattctactagtgaccgagatggtaggttcgctcgtgcacttgatgccattagcaattttatcgttggtggcctacatcgtcgttgacttaatggggggcgcgccaatttacgcatcattattgcaacgcgcacttggcaaaccacatcgtaagttagcaacattctctgatcgcttggaggtaccagtgtttgcgggcgcaccgttagaggatcgccaagtccgtgaagtggactggccaaagacatgtttgttaatcgcgattgttcgtggcgaatccgaactgattccgcatggtgatacgttgatccgtgctggtgacacgttgattgtgttaacggatcatcagctacgggcgacggtgcggcggcaaattgaagacgctgcccaagccttgcgaaatacggatgagaatctcgtgaaataatcgataaaaaagtggtgattaactactttttatgctaaagtattaaaagacagtgtagatagaaaggtagggaattaggttggaaaatcttatcctgaacttattattaatcgattcaatcttgattgtgattgcagtcatgatgcaaccaagtaaacaacaggatgctttgagtgcgttatcaggtggttctggtgatttatttggcaagcaaaaggcccgtggtttcgaagctttcatgcagaaagtaaccgttgttttaggggctttattcttcgtctttgcattagctttagtgtacttatcatcacactaatacatgtgagacgggtcgaattctaataagaacgttgatgcggtctcctgttgaatggcaggagacctttttaaatgaattcaagcagtaagaactttgggggtgagcgcatgtcttatcggttgccgcaaccgttttattttgacggtggttcagtcggggttgtgttgttacatgcttatacaggtagtgcgaatgatgtccgtatgatgggccgctttttggagaaaaatcagctggcggttagtgcaccacagtttgcagggcatgcaacggctgatccaaccgagattttaacgcgcggttctgtcgatgcatggtgggccgatacggtggctgcgattgagcagttatccgcggctaacaaacaaccgttatttgttttcggattgtcattaggcggattgtttgccatgcgggcattagaagaactaccacaagtttgtggtggtggaatttttagtgcgccagtactcgaaggaccgactgctaaattgacgccgctctttggccaatatgctaatcgaatcatgcagttaatgggcgtcccggctgcgcaacagacagcacgtttggcgactattaatcagcaattaccacaacaacttgcatcaattggcattttcagtcgacaagttgtggctgacttgaagcaaatcggagataaaccggtcttcatcggtcaaggcggacaagatcaagttattgatccaacacaagcccaagtcttacaccagcaattaacgcaacaaaacataacagttgattatcattggtatccacaagccggccacgtcattacggtcgatagtgcgcatcaccaattagaaacagatgtcctagaatttataaaccgttttaagaaatgagaaagaggtgttgatgtgacacaagttgaacagatgaaagcagcgattcttgcaatttttgaagcagatgcaacgcaacaattaaacgtatccgaaattagtgaacgaatcggcgttgccggttcacaagggttcaaagacctagtgaaagtattagcagaattagaaggggataagacattgaatatggacgatgccggtaagttcagattaccagctagcaaccgccttgttgaaggggtcttccatgctaacgatcgtggctttggcttcgtttcaatcgttgataaggaacctaatgatccagatatctttatcgccccacccaatacgaattttgcgatgaatggtgacacggttgaagtggccatcattaaagaagccgaagaaaacagccgccgcggtcctgaaggaaaagtggcgaaagtgattacgcgggggattgaagaaatcgtcggcgaatttatgccttattcagatatccaaaaagaaaaaacaggctggattggatacatccaaagtcatgccaaaaaattaagtaattaccgaatttatttaacggataatgggttacatccacaaaagggtgacatggtccaagttgacgttaccggttacccaagtgttgaggcgccaggtcaaatgctggggattgccaaacaagtacttggtaacaagaatgatcccggcgttgacgttttatcaatcgtgtatcaacatgatattaagacggacttcccagaagaagttcggcttcaatcagaagcgattccagatatagttttagaatctgataaactaggtcgtaaagatttaacggatcaagacgttgtgacaattgacggcgacgattctaaagattttgatgatgcagttaacgttaaaaagttggcaaacggcaactactacttaggggtccacattgctgacgtgagttactatgtcactgaaggttcaccattagacgttgaagccttagaacgtgggactagtacttatttaactgatcgcgtgattccaatgttgccattccgcttatcaaatgggatttgctcattaaatccagacgttgaacgtcttgctttaacgtgtgaaatggaaatcaatgaacacggcgtggtagtggatcacaagattttcccaagtgtgattaagtcaacagcgcggatgacatacaaaaacgtcaataagatcttaacggatcaagatgctgacttacgggcacaatacgaacggctcgtgccaatgtttgaaacgatgtcagaattacatgaaattctcttgaagaagcgtcataaccgtggtgcaattgattttgaagaagacgaagctaagattatcgttgatgaaaatggcaaggccatcgacatcgaattacgccaacgcggtctttcagaacgcatgattgaatcatttatgttggctgctaacgaaacagttgcagaacattacagtactgctaatgcacctttcttataccggattcatgaaacaccagatgctgataagatgaagaatttctttgaatttatcacggcttatgggattcaagcacacggttcaagtaagaaagtgacgccaatgatgctccaagaagtcttgacgcaaattgaaggtcaacctgaacaaccgattattacaacgatgttattaagaagtatgcaacaagcacattattctgatgaatcccttggtcactttggtttgggtgcggaattctacacgcatttcacgtctccaatccgtcgttaccctgatttgatggttcatcgtttgattcatagttatgccacaaatgggatgacgattgaagaaaaagaaaaatgggcacctaagttacaaccaatcgcagaacaaacatcccttgaagaacgtcgctcaatcgatactgaacgggaagtcgttgatcttaagaaggctgaatacatgcttgataaggtcggtaatgaatacgacgctgtgattagttctgttaccagctttgggatgtttatcgcattaccaagcacggttgaaggcctcgtccacatctcacagatgaaagatgactactatagctttgttgaaagccaattagcccttgtcggtgaaagaacgcataagatgttccgcattggccaaccagtacgggtcaaggttgcgaatgttgatttagatgcccactcagtggactttgaattattagccggtgaagaagtgccattggcttcggctgaaatcttaagcaagattgaagcacgaccaaagcgtccagcacgcccacgtgatcatgaaaaaggcggtcaacgtcgtggtgatcaaaagaaaaacaatcatccaagacgcccagctgcgaacaaggactcacaaaaacgtacttttaaaaagtaggtgattgaatggcaaagaaacatcctcaaaaaccagcaaatttaattgcacagaataaaaaagctggtcacgattataatattttggaaacattcgaagcaggcttagtgctcactggtaccgagattaaatcggtccgtaagggcaaaatcaacttacgtgatgggttcgcccgcgtccgtaaaggagaagcctatctcgaaaatgtccatattagcccttatgaacaaggcaatcagtttaatcatgacccattgcgcaaccggaagctattgttgcacaagaaggaaattaccaagattggtgctttaacgaagaataaggggattacgattgtgccgttacgggtttatttgaaacacggctttgccaaagttttaatcggcgttggtgaagggaaacgggaatacgataagcgcgaaacactgaaacgaaaagaacaagatcgtgaaatggcccgcgcagttcggattaaaggttagtcctttaattaaaatctaagtataaagtcaaaaagctatcacaaaatttacttttgtggtagctttttctattggaagtatttggtttgtcggcggttacaagtgggtttttattacacaaaaattataaatgtcttcaaactgtaatataacgtcattaatctgcaatcttcttgcggggattgttgcgtataatcaagtctgagttatgaatggaggagtttaacaagatgcgatttagaaaactagcgttagctgttgttacctgtttagttgcaatggttacgatgggcacatctgttagtgctgccagtttgagcgaattacaagcccaagaaagcagtacccaaaaaagtattgatgatacaaattcgaagattcaagccactttaacgagcgtgaatgcgaagtatcaagaaattaatgccttaaaggaaaagattaaggataacgaaaaaaatatcgaacaagcacaaacgcttttgaaaaagcaacaagccactttagcaaaacgtaaaagctatgctaaggaacgcttgcaatcacttcaacgaacagccgatgaccgcaacgttgtcaacgcactattgtcagctgattctttgagtgatttcttcaaccgggcttacacattgacggttcttcaaagtgctgacaaccataatatggatgaattagcacagagttaccgtgatacacaagccattcaagataagttacaagctagcaagacagaacttgatgaacaacgaagcagtttggatcaacaatctgtcgaactggaacaacaagtggctggcttaaagaataatttaagtcaaagccaagcggatcttgcaaaaattgctaaagaaaaagcagaagaacaagcacgtgaagaagctgaagccaaagcggctgaagcagctaaaaaagcggccgacgaagcagcacaagcgccaattgcaccagttgtggacacaaatgctcagcaagccgatttagcaagcgctactgatggcaaggccggacaagcgattcaagtgcaagcaacggcttattcaactgcccaacctggtttaagccattttggtgcaactggaattgatttaactaaaaacccaaattgtatcgccgttgatcctagtgtcattccattaggctcacttgttttggtacctggttacgggtatgcaattgctggtgacatgggtagcgcgattaaaggtcacattattgatgttcattttccaactgttgcggcatgtaagagttggggtcgtcgtcatattacaatcacaattattaagtaattttaaatacagccttttttgaggctgtattttttacttcgtggattgttttggtaaaataaataaaaaattatatttaataaaggttgtcagggcaactcataatgaacgttgttgatgattattagtgaaagttagttgaaatatataatttaatactatagactatttatattgctttaaatcgaagtacggttaagattagctgactaagtattatttagatcggctatcttagaacacggaagaattgaagtactgaatagtgtgagtatgaaacttatcgatggttaactattgatactgaaagtttcagcatgtaggaggaatagaaatggatacgagtaataacaccgatttactcggtagcacatcagcagattttatggaattcgcaggtttataccggtggttgattaacaaccttagcgaatcaatgagtcgtgaaagccaaaaatacggtttatctttcgaccaatttttagtgatgcacgagattcaaaatgcgaataatgaaacaactaacagtgcattggcagataagatgcaagtgagtcgttcagcgatttcacgtcaatgtcgttcattacgtaagatggcttttatcgcagaacaatctgatgaaaatgaccaacgcattcgtcgtgttcatttgacggaaaagggtttggaagtttatcgtcatctcttgttctattacgtagacttgtacaaagatttacaaaatgaaatcggccaagatactgttggcgcaacaatcgaccaaagcaaaaaaatctttggtcgcatggcatcaatgaacatggatcgcccagaagcaaaataaacgttaaaaaaggccacaaccatttgttgcggcctttttttgtgcgattagcaacggtcgcgcataatgacgcgcgtcaatttctttgttagaatagagctagtcactttacgaatgtaggaggaacaacatgggttctcaaaaaaaattattattagtcgacggcaatagtgttgcatttcgtgctttttttgcaatgcaccaagctttagaccatttcaccaatcaggcaggactgcacactaatgcgatttatgctttcaagaatatgttggatattattctgaaaaagattgaaccaacacacgtgttagttgcttttgatgcgggcaaaaccacttttagaaccgaacaatttgccgactacaaagggggccgttcaaaaacgccacctgaattaacggaacaatttccttatatcagagaactcttaacagcatatggtattcagtcttatgaactcgctaatttcgaagcggacgatatcattggtacacttgctaaacaagcagaagctgatggtttcacggtcgatatcgtcactggtgatcgcgatttaactcaattgacgactagtcagacaaccgttaacatcactgttaaaggggtcaatgaaattgaagcgtatacccctgaacacgttcaagaaaaactcggtttagaaccaagccaaattatcgatttaaaaggattgatgggcgatacctctgataattatcccggggtgacaaaggtcggggaaaagactgcgcttaaattgattacggaatttggaaacattgaaggtgtctatgaacatgtcgatgaaatgaaaaagagtaaattgaaagaacatttgattgaagatcgcgacctagctttcacgagtaagacactggcaaccattaaacgtgacgcgccaattacgattggcttagacgatgtggtgtacaacggacctgatatggcagctttggttgctttttaccaagaaatgaacttcaagtcgtttctaaatcaattagatgttgcaccagttgaacccacggctactgaagactatcaatttacagtattaacccttgataacatcgccgatgtcgtgacaaccactgaaaacgttgcgtttggcatcgaaatgttaaccgacaattaccatacagcagacttgattggcttttacattggccgaccagaccactggtatgtcagcgacgacgtaacactcttgacagaatcggttttaaaaacgtggttagaagatgctaaacgtccgaaagcagtttttgacgtgaaacgcaatcaggttgcggtgaatcgcttagggattcacttagcgggggttcaatttgacttactattagcgtcttatttgttgaatacaacgaataacagtaatgatcttggaacggttgcaaatttacatcagtatcaaaatgtccaaacagatgaagctgtttatggcaagggggctaaacgcgcagcccctgtcgatccaaccgtgctttatcaacatctgattcaaaaagcagcagctatttacaaattagcaccacaattgacagaacaattaaaaaaacatcaacaattcgatttattcacggatatggaattgccattagcgctagttttagcggatatggaaatcaccgggattcgagttgatgcaagtcgcctacaacaaatggggggcgagttcagtcaaacgctgaagattttggaagaaaagatttatgcggaagctggcgaaacgtttaacatcaattcgcctaagcaactgggcgtcattctattcgaaaagatggggttaccagtgattaagaagaccaagactggctattcaacggcggtggatgtcttggaacaacttaaaaaagacgcaccaattgtccaaaccatcttggattatcgccaaatcgctaagattcagtcaacgtatgtcgaaggattattgaagtcaattcatcaagataataaggtgcatactcgttacttgcaaaccttaacgcagactggtcgcttgtcatcggttgatcccaacttacaaaatattccagtccgtctagcggaaggccgtaagattcgccaagcgtttgttccaagtcaaccgggttggcagatgtttgcttctgattactcccaaattgaattacgagttttagcccacatttcgggggatgccaatatgcaagaggcattcaaggaagaccgcgatatccatgcgaatactgcgatgaagatttttggcttatcgagcgctgatgaagtgacaccagatatgcggcgccaagcgaaagcaactaatttcgggattgtttacgggattagtgactatggcttatcacaaaatattgggatcacaagggctgaagctaaacgctttattgaagcgtattttgaacagtatccaggtgttcatcaattcatgcaagatatcgtgaagaaggcgcgcgaagaaggctacgttgaaacgctcttccatcggcgtcgctatttaccagatattcacgctaaaaacttcaatttgcgctcatttgcagaacgcacggcaatgaataccccaattcaagggagtgccgctgatattattaagatggcaatgatcttgatgcaagcggaactgaagaaggcaggattacaagccaagatgcttttacaagtacatgatgaattgatttttgaagcaccagaatcagaaataccaatgttagaaaaattagtaccaagtgtcatggattctgcggtttcattagcggtgccgctgaaagttgaaagtggctttggaccaacttggtacgatattaagaaataaggggacacacaatgccagaattaccagaagttgaaaatgtgcgccgcggattggaacaattagtggtcggtaagacggttcaagcaattgagattcgctggtcgaaaattatcagtaatccagacgatgtttttgttgaaggtcttgttggacgccaaattatcggtgttgatcgacgcggtaagtatttattgattcgtttcgatcaaaacttaactgttgtgagtcatttgcggatggaaggcaaatacgaagttgatgatcaatccgtaccaatgactaagcacacgcatgtgatttggacatttacagatggacaacagttacgttatcttgattcacgtaagtttggccgaatgttattaattgaaacgggtcaagaaaacactgtttctggattgaaggacttaggggttgaaccaaccccaacaacgtttaagaaaaccgccttctatcaggcgttacagaaacataaaaaagcgattaaaccactgttgctggatcaaaaaattgtaacgggtcttgggaatatctatgtggacgaaacgttgtggttgagccagattcacccagaaacaccggcgaatttattgacgaaagctgaaacagatcgtttgcatgatgaaatcatcacagagttagaactggcaaccaataacggtgggacaacagtcaatacgttcttaaacgcggcgggtcacgctggggcctttcaggatatgttgcacgtctatggtaagaaagggcaaccgtgtgatcggtgccagactccgattgagaaaattaaagtagcacagcgtggcacgcatttctgtccgcggtgtcagattaagagagaagcggttcaatgacgtattttctaggtttaacgggtggcattgccagtgggaagtcgactgttgcggcattgtttaaagaacagggaatcccggtgattgatgctgatcaagttgctcatcaggtattagcgactaataaatcggtacaggcacaattgcaagcagcctttggcgaagcagttgtcaaaaatggtcaagttgatcggcctatgttgggccagcaagtcttcggtaacccagaggctttgactcagttaaatgcgattactgggcccgctattttgacagccattaaacaacagatgcaagcagcagatgcaccgctggttgtgttggatgtgccactgttatatgaacaacactacgagcaatattgcgatggtgttgcagttgtctacgttgaacgtaaaacacaattgcaacgtttgatggcgcgtaaccaattgactatagaacaggcaaatgcgcgaattgatagtcaaagtgatttggcgaccaaaaaagcgcgagcggatttcgtgattgataatcaaggcacacctgcaatgttgcggcaacgtgttttggcgttgttacaacagttgtgtcataacaagtaatacaagcggtcgaacagattattctgttcgaccgcttttttgtttggaaaaggcgaaatgccttgagactgatacattttttgtttagcctgcttgcctggcatgttatactactgttatactaattgttttaaaattggattgaatttgaaacgaattaatcaaaagataagaaggtgtcattatgctatgtccacattgtcatcagaatagttcgcgggtaattgatagtcgtcccacggatgaagggcgagtgattcgtcgtcgccgtgagtgtgagaattgtcgtttccggtttacaacgttcgaacgagtggaacaaaccccattgttggtaatcaagaaaaacggaacgcgcgaagaattcaaccgtgataaattattgcgcgggctaattcgtgctgctgaaaaacgccccgttacaatggagcaaatgactgaagtagttgatgaagttgagaataagattcgctcattgggtgaaaacgaagtctcttcacaagccgtcggagaatacgtgatgcgcttgttaccagatattgatcagattgcctacattcgctttgccagtgtttatcgcgaattcaaggatatgaatgtctttatgagtgaattacaagaaatgatgaataaagaaaagacgaagaaatcgaattaaggaagaggggttagccgatgtcagatgcatttgattttttgagtccaaaagacggcttttcagtgacaaaagctaactatttgaccgatttcgatcaaacagtcgtcacttacttatatcaaccattgatgggggctgttgcttacagtctctatcttttgttatggagtcaaaccaagaaagaaacggaacaacattttcaaacacatgcgactttgttaaatctgttgagtgttgatttacctgctttttatgacagccgcagcaaattggaagcacttggtttaatgcggacgtatcaaaaaaatgagggaactggccgcaagttggtgtatgaactgtatgcgccattgcaaccacaagctttttttaacgatgatttgttaagtgtggcattgttcgaagcggtccgcgaaacacggtttgtggaactccgtgactatttcaagctacgaccggtttacgccaaggattatcaagaggtcactaagaatttcttgaccgttttccatgtgcaaaacgatttattgacgaccgcgccaagcagtgtggctgaaactaaggcaatgtatcaacaaaaagcagctagcacaccgcagtttacctcagttgagttgcggacttttgattgggacctattacaagatgcaacggcgcaataccagattgatacggatcaaattctcaaaaatgaacagggcttgtttaatctccattatttctatggtctagatgagatggacttagcgcgtttgattggcttgacgatgaatgttgctgacagtacgattaatatggcagcgctcgaacagaacgtcttgaacaattacacacgacgtcagagtaaccggcaaacgccagctgctacaacaacgcaaaaaccgttagccgagttacaaaaagaatggcaaaaagccggctttaacgaacaggaattgcagtggctaacagaaagtcagggctacttgccagttgattatctcgaatacttgaaacaaaagaaccacggctttgtcgctaaaaatgaaatccgggcgttaaaggacttgcaaaaccgctatatctttaacaacgatgtgctcaatattttggtcgtttatatcattacgcaatatgatgggctcactcaggcgctagtcgatcggattgcgaaccagtgggctcaacaagaggttaagacggcagcggatgcgattttgcagattcgcgatttccaaaccaaacagacggcaaaggtgcaaaacaatcgccaaacgcgttatcagaacaaaactaaaaaagaaccagtacctaaatgggctaaaccagattatcaagcgccaaaagaaacaaccacacctgagcatcagcatgaactagaagtggcgttgaaaaaaattcgtgaggggcgggaatcgtaatggaaaatatgggtaaagatttgacggattacatgaatcggcaaaagttaaaccaacagtttaataaattggtcgaagatgccttgaacgattccgatgtccaagcatttatacaagctaacaaagaccgcttatcacaagaaacggtcacgcgtagtgccgctaaaatttacgaatacgtcatcgaaaagaagaagttagctaatgggcaaaccactttggcaccgggttatgcgccaaagttagtcttaaataaccattttatcgatgtcagttatgagcctacggcaagtttattacaagagcgcgaacaagctgccttgcatgcacgagtgaagtcaattaatatgccgcgcgatattgaacaggccaagattgattcatacgatccaaccaatcgatttgacgcattgatcaaagctaccgcgtttatcggggcttatcggcaagcaccccatgattttcaccaagccttgtaccttagcgggcaattcggggttggcaagacttacttgttaggtgcgattgccaacgaactggcgttatccgggtttgaaaccacgttgattcatttcccgacatttgcagtggagatgaagaatgcaattgggcaaaacaatgtgttagaaaaggttaacgtgataaaaaaagcaccgattctgatgattgatgatatcggtgctgatgcaatgagtgcgtgggttcgggatgaagtacttggcattattttgcaatatcgaatgcaagaacaactcgccaccttcttcagttcaaacttcacaatgactgaattagagacgcatttgacaactagcaaccaaggagacgaaccggttaaagcggcccgcatcatgcaacgtgtgcgctatttagcgcaagaaattgaagttggtggtcaaaatcgccgcttacaaccttagtaatttaggcttgctaaaaaagcaattaagtgttttaatagaatcaatcaatgatgaaagacaccttttaaatgaaccatcgcagagagaaaaacatagctgaaagtttttcacccccatttaattgaccactttcaaaggcaatacaactgatcgggtcgtttccgttatagacgcttaaagttggagaaccaaatgttggggtctcaatctgggtggaaccgcgaaattaattcgtccctgagctgcacaattcgtgcgtctcagggactttttttattgttgatgacaaattagaaggagtgaatagtaatggcagagattcaattaacttttccagatggtgcccaaaaggcatttgaacaagcaacaagtcttttagatgttgctaaatcaattagtacaagcttagctaaaaaggcaattgccggtaaattgaacggtgaattagttgatttacagcaaccaattttagaagatggggcaattgaaatcatcactaaagacgacaaagcaaccgatttgatggcaatttggaatacggcagcctttgttttagctgcaacgttgaaccgtgcttatcccgagatgcaattcggcgaagtacatgcaactgaagatggcttcttctatgataccgaaaacgaagctggtcaagtagctgtgaccgacttaccagacattaaaaaagcaatgagcaagttaatccaagctggcggggcaatcgaacgtgtcagcttagacaaagctgctgctaaaacactatttgctgggcaaacttacaaattagcattattagatgaaatggaaacagaccaagtcttagtttacaaattaggcgattttgctgattttgggttagcaccaatgctagctaaagtgagcgacgttaaggtctttgaactcttatcggttgccggcgcttattggcaaggtaaatcaagtaataagatgttacaacggatttacggaacagcttacaacaaacaagctgacttagatgctgacttacagcgtcgtcaagaagctaaagaacgtgatcaccgtgtgattgggaaccaattagacttattctttgttgatcctaaggttggtgcgggcttgccttattggttgccaaatggtgctaccatccgacgttcaatcgaacggtacatcattgataaagaagttgccaatggttatgaacatgtttacacaccaattctagcgaacttagatttgtacaaacaatcaggtcactgggatcactaccgtgaggacatgttcccaccaatggatatgggcgatggcgaaatgcttgaattacgcccaatgaactgcccatcacatatccaagtttacaaacaccacccacgttcatatcgtgaattaccaattcggttagctgaactagggatgatgcaccgctatgaaaaatcaggtgcgctttcagggttacaacgggtgcgtgaaatgactttaaatgatggacatacattcgttcgtcctgaccaaattcaagatgaattcaagtcaattttgaaattaatgattgaagtgtactcagacttcaatatcaacgattatacattccgtttgagctaccgcgatcctgctaataccgaaaagtactatgctgatgatgaaatgtggaacaaagcacaaacgatgttaaaaggggctatggatgatcttggtttagattacgttgaagctgaaggcgaagctgctttctacggtcctaagttggatgttcaaacgaagacagctatgggcaatgaagaaacactttcaacaatccaattagacttcatgttaccagaacggtttgaattacaatatgttggcgaagatggcgaaatgcaccgtccagttatgattcaccgtggtttagtatcaacgatggaacgtttcacagcttacttaacagaaatctacaagggcgctttcccaacatggttagcaccaactcaagctgtgattattcccgttaagaatgaattacattatgattatgcaaagaacgtcaaagatgcgatgattaaacatggtttacgtgtgcgcattgatgatcgtaatgaaaagatgggttataagattcgtgaagcccaaacaagcaagattccttatacattagttgttggggatcaagaagttgctgacgcaacggtttctgtccgtaaatacggtgaagaaaacgctgctgaagaagcttcagatatgtttgtagatgcaatcgttgctgaagttggtaactacagtcgcgatggtaaagatcacaaaacaatcaacctataagcggttattaaaacgtccgaaatgttattttgacatttcggacgtttttttgtttttttaattgcgcacaactaaaaaagcggtataataaatatgtaaacgattccaatcgttgattaatgggaggcgttattatgacgacagaaaaatatcaagtaggttcagcagagcaaccattggacattattaacctctatgacttggaaaaagaagccggcgaagttgttcccaagggtggctttgggtatatttacagtggcgcgggtgatctttataccattaacgaaaatattacggcatttaatcacaaatacatcgcaccacgggttttacaagatatcgaaaatccagatacaactaccgaaatctttggcgatcacttaacatcaccaatcattatggcacctgttgcagctcataagttagtgaatactaaaggggaagcggcaaccgctaaaggtgtggctgattacggttcaatcttaaccatgagttcatttgcgtcagcaagtatcgatgatatggcaaccgcagcagatggcgcaccgcaatggttccaactctatatgagtaaggacaacgatatcaatcgtaagattttagatgaagcgatggcgcataacgttaaagcgattgtcttaacagctgatgccacagttggtggtaaccgcgaaaccgataaacgcaatcattttacattcccagtcgggttaccaatcgttgaagcttaccaaacaggtgtgggccaaacaatggatgccgtctacaaatcagctaaacaacgtttgaaccctaaagatgttgaattcatttctgaatacacacatttaccagtctttgttaaagggattcaaacagcagaagacgttgaaattgcacttcaagccggtgctaaagggatttgggtatccaaccacggtggtcgtcaattagacggtggccctgcagcctttgattcattacacgtcgttgctaaggcagttaataaacgggtaccaatcgtctttgatagtggtgtgcgtcgtggtcaacacgtctttaaagcattggctgaaggggcagacatcgttgcaatcgggcgcccagtcatttacggattagcacttggcggtgcacaaggggtacaaagtgtctttaactacttgcaaaaagaattagaattagtcatgcaattagctggtacacacaacattgacgaagtaaaagccacgcacttagtggacaatcattacggcaactaagtacacgtaaatttaaatgcgggatttccttgactttaaattcctaaccgagtatacttattttcgttgagaaataaagcagaagttcccgcttctcgccttagtagacacttgatgtctctgggctgatagtttctaattcggacgaactaagtaaccgaacaagcgggcctttctgttatgagagggccgctttttttattacttagctgcattttctctctaaactttatggaggtgaagagtcatagcaaaagatttgatggttaacgatggtattcgtgcacgagaattgcgtttgattgctcaagatggcgaacaacttggtattaagagtactcaagatgcaattgcattagctgatcaagctaatatggatgttgttttggtttcaccaaacgcaaaaccacccgttgctcgtattatggactatggtaagtaccgtttcgagcttcaaaagaaacaacgtgacgctcgtaagaagcagaaaaccattaacctcaaagaggttcgtcttagtcccacaattgaacaaaatgattttaatactaagttgaacaatgcacgtaagttccttggcaaaggcgataaagtgaaagcttctattcgtttcaaggggcgcgcaattacgcataaagaaattgggcaacgtgtattggaaagacttgctaaagaaacagaggacatcgctaaagttacagcacgtcctaaaatggatggccgtagcatgttcttaatgttagaaccgctaaaggaccaaaaataaaaaatctgtttctgatttattaggaggaaatatcatgccaaaatttaagacacaccgtgcttcagcaaaacgttttaaacgtacaggtaatggcggcctaaaacgcagccacgcctacacaagtcaccgtttccacggcaagactaagaaacaacgtcgtcaattaagaaaatctggaatggtttcaaatagcgatatgagacgtatccgtcaaatgttatcaggccttaaataagccatagcattttcggattcaagcaaaaattagatcagtacagcaacgctttgacgttgtttgttattcaaggaggaaattcttatgccacgtgttaaaggtggaacagtgacgcgcaaacgtcgtaaaaagattttaaaattagccaagggttatcgcggcgctaaacatttattattcaaatcagcaaatactcaagtaatggtttcataccgttatgcattccgtgatcgtcgtcaacgtaaacgtgacttccgtaagttatggattgctcgtatcaatgctgctgctcgtatgaacaacatctcatacagccaattaatgcacggtttaagagtcgctgaaatcgacatgaaccgtaagatgttagctgacttagctgttaacgatgctgctgcatttacatcagttgttgaagctgctaaagctgcattaaacaaataattaaagatcaaaaaaagagtctgggacaaaacttcgttttgttctagactctttcttttatcattataaaattagtggctaataacaatcttacctggggcatgatgactctcaaggagtttgtggccttcaataatgccttccaaagtaaatgggagcgtcttgaagacggtattgtgtagtaaaccttgatcgatcaattcatttaaatcttgtaaggcggttaaatctgcataatccttacgcggatagacagattggtaattgatgtcagcgcgttgttgatcgtctgttggtaagatggtcgttgaagtgaatgtgccacctggtgcaactaagttattgaggcgttcagttgattctggatcgcgacttaagttgataccgattttagcggtctgtgcaagtcgttcgaagtcagatggctgatcataagcaattacttcttggacaccgaatgagcgcagatagtctaggttagcactattggcaattgcaagcacgtttaaatgagctgctaagcttaattgaacgagtaaactaccaacggcaccactggcacccataatagcgattgtatcgccgtgtttaaagtttgtgaagtgcatcagcgtattgtaagcagtgatgccggcactgggtaaaccggctgcttcagcgatactcatgctggctggcttacggagaatcttcgcagtactagccgttacgtattcgctataagcacccattgatcggtgattgatgacgatttcgccaacgcggtaatcatcgacgtcagcaccaagttcaacgatttcaccaaccacatctgtaccaggaaagattgggaagggtaatgggcgcactgaatcttgtgaaccattccgtagtgcaacatcgtatggattcaatccagcagcgagcactttaatgaggacttggttgtcctttggagttggttgaggctgatcgaaacgttcgaaaacgtcagggccgccaaagtgattaaaaccgaatttttccataacaaacacatcctctcaatttctttaaacgtaccagagttggggctaaaagtcgattagtttgacttatggatttaaatggattaggaattagttggaaattatggaaattaaccgcgtaaaggtgcaatttggtgtcaaataccctataattaatcagtgactagattaaaaagaagtgcgtcagtaggcggttatatttcgaggactagcctagtctggcgaatgaccaacttgttggtcgtttgacggacgtcgctagccgcaaaaatatgcctactgaggcacgttagaaaagaagtgcgtttaaacctggtatactccgagcactagcctaacaaggcgaatggttgctgcaagcaatcgtttgacttgtgtcgctaggcataggaatatggtttgaaaagcacgttaaagaaaagaagtgcgtcatccacggttagcttccgagcatttgcctaacttagcgaattggcgctgcaagcgccgatttgataagtgtagcaaagcgcaagaagctgttgatgaaagcacattaaagtcgaggggacagtacatgctaaagaatttcaagccaacttggatggtcaatgccatctacgacttaacaccagaacaacttaaggcaaaagggattaaggccgttttaacggatttagataatacgttaattgcgtggaataaccccgatggcacaccacagttaaaagcttggttagcacagatgcaagctgccgaaatcaccgtgatggttgtttcaaataacaaccatgatcgcgtgcaacgcgcgctcagtgaattgcaattaccattcattgctcgggcgaacaagccattggcaactgggattaccaaagcgaagaagcagcttggcctttcgcgacatgaagtggtgatggtcggcgatcaattgattaccgatatgcatgccggtaatgtggctggcgtccggacgatattggtcaaacccattattgacagtgatgcctggaatacatcgattaatcgattctttgaaaaatatattatgcaacaactactaaaaaaacacgcagatttaacttggcgggaggatttaaatgactgaaacacaacaaactgaggaagaactattttgtattggctgtggcgctcgcatccaaacaacggacaaagaagcactcggctatacgcctaattcagcgcttaaaaaaggcttggaaacgggtcaattgtattgccaacgttgttttagattacgacactacaacgaaatcagtgatatcaaattaaatgatgatgatttcttagccttattgaaccaaattggcgacagtgacgcgttgatcgtgaacgtcgtcgatatcttcgactttaacgggagtttaattccagggttacatcgttttatcggcgataaccccgtgattttagtggggaataaggttgatatcttaccatctgctcttaacccaaataaagtgatcaattggattcaaaaagaagcgaaagaacatggcttacatccggttgaaacgatgttggtcagtgctaaaaaagggaattcagttgatgaattattggccgtgattgaacgcgaacgtaaaggccgcgatgtctatgttgttggggtgacgaacgttggtaaatcaacgttgattaaccgcattatcaagcaaactgggattttagatagcgacgtgattacgacgtcacaattcccaggaacgactttagatcgcatcgatattccattgtatgaagatgatcatgcattgattgatacaccagggattatgcatgcccaacaaatggcgcattatttacatgataaagacttacggttgattgcgccgcaaaagcggattaaaccaaaagtataccaattaaatgaacaacaaacattgttcttgggtgggttagctcgttttgatttcattcaaggtgcacggcatggctttgtcggttattttgacaatgaactttacattcaccggactaaacttgaaaatgcagatcaattctacgctaagcaattaggggacatgctacagccaccacatccagaagatttagctgattttccagaactccaacggtatgaattctcaacaaagcaaaagagtgatttagtgtttgctgggttaggctggattacgttaccagaaaatgtcgtggttgcgggatatgcgcctaaaggtgtctcagtcatgattcggaaagcattaatttaattagggaaggaagtatcgcacgtgttaacaggcaaacaaaaacattacttacgcggtttagcgcaaaccactaaaccactttttcaactaggcaaaaacggcttaagccaaacttatttcgaacaaattgaagaggccatcgaaaaacgagaactcgttaagattaacttgttacaaacaacagaagtgaccgttgatgaattagccaacttcttaaaacaacatgacagtcgcatcgaaattgcgcaaaaaattggacgcacattggtgatttataaagcttcacggaaagaaaaataccaaaagatttcaacgattgttactaagctcggacgctaataaggcggtgatcagatgcaaagtgcaacgctaaagcagacaaatcatgtgactgaaccggacgtgttggttgtagaagatggccatcgcttgcaagtcggcattatggggggcacatttaacccgccacacatcggtcatttagtgatggcagaacaagttcgtagccaactcggtctcgataaaattttgtttatgccagatgccaatccaccgcacgttgatgagaaaaaaacattaccagcaaaacaccgtgttgcaatggtagaacgtgccatcgctgacaattcgcattttgaactcgatttaacggagattgaacgtggcggtgtcagttacacctacgatacgatcgtggcattaaaacaacaacaccctgaaatcgattattatttcatcattggcggtgatatggtcgactacttacctacttggtatcgaattgatgatttagtgcagttagtccaatttgttggtgttaaacgaacagggtatgctcaacaaacgccgtatccagtcttatgggtggacgcaccggtaattgatgtcagttcaacgcaaattcgcaataagattcaacaaggctgttcagtgcggtacttgttaccggacccagtctttgaatacattcaaaaagagggcctctatcatgagtgattttgtttatcaagaaaacatcgtgccgtatacacgggctgagttagtggctaaagttgccgctaacttatctgaaagccgatttgaacattgtttgcgtgtggaagccaccgcgattcaattagcacaaaaaaatggcgcagatgttgaacgcgcggcaattgctggtttagtgcatgactatactaagcaattaccagatgaaacgttcattgaagcgattaaaacgcaaggctttgatccagaactactcaattacggtaatgccatctggcacggtgttgttggtgcttatttcattgaacgtgatttagaaatccatgatgaaacgattttaaatgctgtgcgtcgtcatacgattggtgcgccagaaatgaccttgattgatcagattttatttgtggcggattttgtcgaacctgggcgcaattttccgggcgcagaagctgctcgtgagacagcaatggctgatttagcagccggcgtgcggtatgaaatcttaaatacattgacctttttaattcagggcaagaagcagatttatccgaaaacaatcgacacatacaatgcttgggtaccgactcaagccaaataaaggagaactttagtgaaaagtttagatattttaaaaattgctgtgcaagcagctgatagcaaacgagcagaagacatcgtcgcaatgaacatggaaggcatcagtttattagctgattacttcgtgatgttaactgggacgtcagaacgtcaattaggcgcaattattgacgccattgaagacgcagaagaagaaaatggcgttttcgtaaaacacatcgaaggtaaaaagggttcacgttggatcttgatggactttggcgatatcgttgtcaatgccttcatgccagaagaacgtgccttatacaaccttgaaaaactttgggatcaagcaccacttgttgatgtttccgaatggttggatgaagaatgatttaccaaagctttgcaaccgtctatgaccgtttgatggaccattcattatatggtcaatggcgggattacacgttgcagacgttacaaaataaacatcgagtcctagaactagcttgtggggctggtgatttagccatcttgctaaaacaagcagggctagaggttgtcggcttagatttatcggccgagatgttgagtatcgcttctgaaaaggcttctgaagccgaggtcgagttacctttattacaaggcgacatgcttgacttaggcgaaattgggacgtttgaagcggtcacttgttttgacgactcgatctgttacatgccagatttagcgcatgtccaacaagtttttgaacaagtttatcgaactttagagccaggtggtcaatttctatttgatgcccattcactttatcaaatggatgagcttttcccaggttttatgtataacgataagacggcagaaacggccttcatgtggacgagttacgcaggtgaagtaccacattcagttgaacatgatctcagcttttttatctgggatgacgagattgacggttatcaagaacttaatgaattacaccatgaacgaacttatccggtggtagattatgttgcagcattagaagctgctgggttcaagaatgtatcagtcagtgctgattttggccaagaagccgttcaagaagatagtgtgcgttggttctttagcgcagtgaaataggcggaggacgcatgagaattacggggattattgcggaatataatccgctacataatggacatcggtatcaattgcaacaggcgcgggcagcttcgcacgcagatttagtgattgtctgcatgagcggtaactatgtgcaaagaggtgaacccgcgattttggacaaatggacgcgcgcacaacttgctttgagcaatggtgctgatatggtcgttgaattgccgtttgccagtgctgtccaacctgcagaccgttttgctgatggggccgtcaagttattggcggcgcttggttgtcagaccttagcgtttggcagtgaatatccaacgtttgactatcagcaagtcgggcaacagattttagctttaaaggccaagtcacagacgtttattgattatcaaaaaacttatgcgacgcagctcaatgagttttatcaagcagaattaaatttaaatttagatcaacccaatcacctcttaggggtcagttatgcggttgccaacgcgcaacttgaagtgccaatgcagttgcttgcgattaagcgtgagcaggcacaacacggcgatcaaacgattggcgcgggacaatttgctagtgccagtgctatccgacaggcggcaacaaagggtgatgactgggcacagttagccccagtgatgccgcattcgactttaacagcgctccagactcaatcgcatctggattgggaccaactatggccgctattgaaataccgaattgaaagtacaccccttgcccaacttcggcagatttatcagatgtcagagggcttggagtaccgtttcaaaaaggtgattcattcagtcaatcggtatgccgagttgttacaggcacttaaaacaaagcgatatacgtatgcacgcttgcaacgggtttgtttatacgtcctgttgaatattcaacaaacggatattgaacaatcattagcgcagcggcccatccatttgcttggctttaaccaagtcggccaggcgcatttgcacacgttgaaaaaaacgctcgatcaaccacttatcagtaaggtctcagctaaattgggtgccgaagagggcccactggggttagaggtgcgagttgatcgattacaagaacagtttggctggcaatcacagaattttgcccgccaaccgatttttaaccaaagaaaggatgacgagcattgttaaaatggacagtccaatcattattaaaacatcgtgatcatccattgatgtttaaagaaacattgatgttaaaagaaagtttacaaaaaagagaagctgatgtcctagatgctacaccatttgtagtagacggtgaattaacggttgaccagcgcgctgtaattgcacgcgtacatgtggtcgggacattaacagtgccttcaacgcggagtttagatccagtagccttgccaatggattttgaattcactgaaatctacgttgatccagaagacgagcagttgggacgatttacggacgaagatattttgttcccaatcgaaggcgaagccctagagctacaggtagctgttgaagatcacattctcttgcacattccaagtcacatcctaacaccagaagaagaacaagatgatgtgatgccagccggacagtcgtggtcagtcatttctgaagaagcctatgctaagcaacaggctgaagaagaaacggcacccaatcctgaatttgctaagcttaaacaattattagaagaacaaaacaatgacgccgactaagtttggcgtttttttatacccaatttgttaaatggaccggaccaaatcagttaaaatgcttttatttaaagcgtaattctgctaacataaacacagtagacgcgttgtcgttttgatagtcaacaacgcttaaatttagaaatcatttaggaggccttttacatgagtcaaccacaaatcggtgtcatcgggatggcagttatgggcaagaacttagcattaaacattgaaagtcgcggttacaccgttgcgatttataaccgaacaggtgctaagacagaagcagtgatgcaagatcacagcgaaaagaaattggtaccaagctatacaattgaagaatttgttcaatcattagaaaaaccacggcgaatcatcttaatggttaaagccggcgctggtacagatgctgtcatcaacgaattgttacctttattagataaaggtgatattttaatcgatggcgggaacaccttctttggcgatacaattcgtcggaatgctgaactagataagtcaggcattaactttatcggaatgggtgtttctggtggtgaattaggcgcattagaaggcccttcaatgatgccaggcggtcaaaaagaagcttatgaattagttgcaccaatcttagaacaaatgtcagcaaaggctgaagatggccaaccatgtgtcacatacatcgggccaaacggtgctggtcactatgttaagatggtccacaacgggatcgaatatggtgatatggaactcatctcagaaagttataatttattgagaaacgttgttggtttatctgttgaagaaatcgctgatgtcttcaaagaatggaaccacggcgaattagacagttatttaatggaaatcacagcggacatcttaacgcgaaaagatgatttagaaacggataaaccaattgtcgacgtcatcttagatgctgctggtaacaaaggaactggtaagtggagttcacaaagcgcccttgaattgggtgtgccacaatcattgattacagaatctgtttatgcacgttatatttcagcaatgaaagacgaacgggtggctgcaagcaagattttaccagccccaaccgttgctaaattaacagaagataaaaaagaattaatcgaaaagattcgccaagcattgtacttcagcaagatcatgagctatgcgcaaggctttgaacaaatgcgggttgcttcagatcaatatgactggtcattaaactatggcgaaatcgctaagatctggcgtgaaggctgtatcattcgggctcgtttcttacaaaagattacggatgcctttgataaaaaagctgatttaaacaacttattgttggatgattacttcttagatattacaaagaattatcaaggcgctgttcgtgacgtagctgcaatggccatccaacaaggtgtgccagcacctggtttctcagctgctatcacatattttgattcatatcgttcagaagtattaccagcaaacttaatccaagcacaacgcgactactttggtgcgcacacataccaaagaacagaccgcgaaggcacattccattatacttggtataaagaacaatagagtgcgcaagtagacggggatgcgctgaggattagtggaatatcgtaaatgagcggtgaaaccgatcgtttgcggtatgtaactaaccggaagcggatgtctactggagcacgttttagtacaagagtgctgactattgcatttagtcattgagcattaataaaaaattgccattaatcccggttttaggattaatggcaattttagattaagcggaaatggctgcgacgggatgcgcgttttaaaatagagtgatgagtcgaacgtttttggctttgaggtttaacagaaaaatgatgcttatggcggttcttagccataagcatcattttacggttaaccggaaaagacagttcgaggaagcacgtttctctaaacacccgagccgattattaaggcgcaggtgttttttcgattattactaaatcgccatcagatgagagtcagattagttagttatttaattggaactatgctaaaatggaaaggtaagccgattttggcgcttgaggtttcttagagaattcttatcattgattagaatttagagagtccattaaaaattcttttttggggagtgactaaatgagtcgcatattgattattgaagatgagaaaaatttagctcgatttgtggaacttgaattaaagcatgagggttatgagacagaggtccatttcaatgggcgtactggtttagaagctgccttgaatgaagaatgggacgcgattttattagacttgatgttacctgaattaaacgggttagaagtctgccgtcgggtccgccaagttaagaatacgccaatcattatgatgacggctcgtgattcagtgattgaccgtgtttctgggttagatcatggcgcagacgattatatcgttaagccttttgccattgaagaattattagcgcgtttacgggcattgctacggcgaattgatatcgaaggcgaacataacgctgctaaacaaacgacggttacttaccgtgatttaacggttgaaaaagaaaaccgagttgttcggcgtggtgttgatgtgattgaactaacgaaacgtgaatatgaattattattaacattgatggaaaacgtcaacgttgttttggcacgcgatgtcttactcagcaaagtttggggttacgattcggatgttgaaaccaatgttgtcgatgtttatatccgttacttacgaaataaaattgatcgttctggcgaacaaagttacattcaaacggttcgtggaatgggttatgtgatgcgctcgtgatgcaggacgaaacggtagcatcaacaacaaataagggtcgtaaaatatcgttaaaggtgaaatgggcagctgcggttgggttggccatttttatcacctttgcgattttttcaattgtgatctttagtagtatctctaatatcttgctacacagagaagtcgataatgtgcacgatacggtgaccgtcgtacaagcgagattgtccagcaatgggccacatcttacagaaggctttgtcaccaatcaattggatccgaaccgtcacagccctaaagccatctatcaagatgcggttttaacgcggttagcacaacaggatgttacagttaagatttatgatgcaaacaagaagggtttgtttgcatcgcgcggggcgattggtccgtttccaaaaggcgatacggatacattaaagcgcaaagctatttttggtaagatgcggctgattggcattagtccgattaagacaaatcaaaaccgtgtaattggttatgtagaggtggtcaataacgtccgtgattataaccacgctatgactgaattaagaattgtgttagttgtggttgtcttttttgctatgttatttagtgcattgattggctatttattagccaaccaattcttgcgaccaatcgaagttatgaaaaaaacgatagaagccattaattcagagcctaattcagatgtccgaattcctgagactgggcatagtcaagatgaattatctgatctggtcagtgcgtttaatggtatgttgaatcgaattcagcattatttcgaacagcaagaccagttcgtcagtgatgtttcgcatgagttgcggacaccagttgcgattattgaagggcatctacaactgctcaatcgatgggggaaagatgatccagaggtactggaagaatctttagcggcttcgttacaagaaatcttgcggatgaaaaatttaattcaagaaatgcttgatttaacacgggcagataaagtcgtgactgaaggaacgactgaagtgaccgatgtcggggaagttgttcttcagaattaccataacttcgagatgttatatccagaatttaattttatgctcgacaatgatttgcaccaaccagcgctagtgcatgttaatcgaaatcacttagaacaaattatgattattctgttggataatgcgattaaatattcaacgatacgtaaagaagttcatattgccgtcgctagtgatgagcggtatgcgcaagtggccgtgcaagactttggtgaaggtatttcggaagaagataagaagaaagtctttcaccggttctatcgcgttgacaaagcacggagtcgggaaaaaggtggcaatggattgggattagcaattgcccaacaactcgttgaaggctatgacgggaatgtgtcgctagaaagtagcgttggctacggttctgtttttagagttgagttaccactgattcgtgaagtagaaccaaaatcagaagaaccagttaatacggattaaaaaagcggtgcgcttcaatcatctaattgattgaggcgcaccgcttttttttgttggttaagcttgtggcttatgccgttgcttacctgagttgcgtttgccagctactttaggtgtagcgacagttgggttgcttgtttctgttggtgtttctgtgacgtcggcagctggtttgactgctgctttttgagtgaacatttcttttgtgacaaccgtgacgattggtttttccttaatttcttgatcgatccgttttttaacacgaggcatgatgatgaatgtcgtgattaattgttgaatcaccatgataatcccaccggctaagaaataaagtgctaaaccggctggtgcaaataacgaaatgaagaatgtaatcgcaggactcattaggacggttgtttgcatttgtttcttttgttcagcaggcatcccgactaatgaaagtgcactttgaccgacatataagagggtcgcaatcacagtaatgataatgtttgggctcccaagaccgatcccaaagaagtggctacttgaaatttcaggtgagtattggatggcttgatacaaaccagagaagattggtaattgaattaataaggttaaacaaccaagacttggcatcatgcttgaatcattttccttataaaccttcatcatcaactggctaagttcagccttttcttcaggggttgttgccgctttttgttgttcttggataatatctaattgcggtttcaagcgacgggtcttttcttgttgggccgtcatcttattcgattggttcaacattaatgggagtaaaatcatccgcacaacgaatgtgatgatgataattgcccagccgtaaccattgatgccaccgaaaacatcagcaatgcgttccataatatgttggagcggcacggcgatgtatttataggatgaaccatagattaagccggttgggactttgggatggctgctcattttttgtggaacacagccagcgagaaagaatgtaacggtcattgtaagcatcgcgagtgtcgcgaagcgtttagaatttttcataaatttagccctttcaagataagtttcaacaagtgtaactatacttgaaggggctaggtttttcaactgacaaccgaaaatttatgacacgctgacacattttcgagcggtgtttgaatgacacggtcgacgcgcccactaggggtgggagaagctttgacagcaccgataaatttttcgagtgcgtctgctgggcccatcgcaataattttaacggagccgtcgtcacgattggcaacggtacctgtgatatggagtttatcggcgaccaatttggtcatccagcgaaatccgacgccttgcacgcggccatagacttcaagttgaattgcattttgcattgtcatcacctcctcttcattgtaagctgttcaacccgatttggcgattaaaaagcgacccttgatagaatttacccactaagtcgcgtataatagaaagtactaaatagactggagcacaacatggaatacattcaatcgaatcaaaacactaaaattaaggcggctaagaaattaaccgttaagaaaaaccaacgtaaagaaaatacgtatctactagagggctggcatttagtccaagaagcaatccaaaataaggccgtcatccgccaagttttcgccactgaaaaatatgtggacgaacgtgcattgcgcggtctttacgatgaaacttttgaaattgcaccagaagtggcgcaacacttgagtgaaactaaagcaccccaaggcatttttgccgttgttgaaatgtctgaaacaccggtaccagaaaaattaacgggtcgttacttattattagatgctgttcaagatcctggtaatatcggcacaatgattcggacagccgacgcagcagactttgccggcgttgttttaggcaatggcagtgttgacttgtataatccaaaactcttgcggtcaatgcaaggcagtcacttccatttaccaatttatcaaggtaacttgatggactggatgaagaaattcaattcgcaagacgtcccagtttatggaacggaattaaatccagaggccatcagttatcaagatgtgcctaaagcaaatgacatggccttgattctaggtaatgaagggaacggcgtgaatgaaaacgtcttagtagccacaacgcaaaatatttacatcccaattccagggaatgctgaatcattaaacgtggcagtcgcagctgggattttaatgttcaagttgattgaagcttaattcttaattttttctaacaaacgtaactttttaaggcgtttaacttcttttttgaacgaaaagctgttatccttgtggcagaatttgaatttaaaaaatgtcaggagtctttgaatgaattcaacagcaaaatggtacgatgacgcggattacatggctctaattgccgatttattagctaaagatgaagtccaaaaattagcgaactatacgcaacatcatcattcagatcgtttggaacattcgctaagcgtctcttatcgcagttatgaacttgccaagaagtggcatcttgatacgcgagcaattgcacgcgcgggcttattacatgatttattctattatgactggcgtgatacgaagttcgatttaggcacacatgcttatatccatccgcgcattgcgcttcggaatgccgaaaaattaacagaactctcacctaaagaaaaagacatcatcgttaaacacatgtggggcgcaactgttagtcgtccgaaatataaggaaagttacattgtatcgatagtcgatgattattgtgctgtgacggaattttgtacaccaatgtggacgaaatttaaacaaaaagttctccgccaaacaccggcaattaacaagtaaagatgcttcaagctgataggttgctttttgcagcctttttcagtacacttcttattaataagtgtgaggtgaaaataatggtgattgtaaaagaaaacgcaaatgctgactgtcaagaggccttccaactgtgtcctaaatttgaaaagactttttcaattttaggtaagaagtggaacggcctgattatcgatgtcctattagaaaacggggcacaacggtttaaaaacttagtgcacagtgtgcctaagtgcagtgatcgcgtattggttgaacgattgaaggaactagaacaagaaggcattgttgcgcggattaccagtgatgattctgcgttgattgaatatcgattgaccactaaaggtgaagaattagcgccagtaatggctgctattcacgattggtcaaacgactggtatgcgacagaagcctagttgctaattgcggttatttacgttaaaatacaattattaaacaaagacgaaaaagagtaacctaatcattagttttcagggagaataatcagttgactgcaagttattcaactaagtttaggtgaagttcactttctgagttgaccattggtccggtattgcccgttagcgcaaacttgagtgtatgactggaatggtcgtaaactagggtggtaccgcgaagcttcgtccctttttgagggacgggctttttttgttgaaaaaaataaggaggaattgcaatgtcattgaaggaacaattagaaaacttacagcaaaagagtctgcaagaaattcaaagagttgttgatttagaggcgttaaatcaaattcgagtggaagtgctcggtaaaaaaggaccgattacagaagttttacgcggcatgcgtgatttaagtaatgaagaacgacctaaggtgggggcatttgctaatgaaatcaagagtgatttggcagaagcaatcgaaacccggaaggcagaattagaagccaagaaggcagcagcccaactggctcacgaaacattagatgttacattacctggccaaccggtcaaaaaagggaccccgcatgtcttaactcaagtgattgatgatttagaagatttatttatcggaatgggttatcaagtcgttgctggctatgaagtggaagatgaaaaacataactttgaaatgttaaacatgccagctaatcatccagcccgtgatatgcaagatacgttctatattactaatgatttattgatgcgcacgcacatgtcacccaatgaagcacgtgacttggaaaaccatgactttgctaatggtcccattaagatgattagtcccggccgtgtttaccgccgtgatacagatgatgcaacgcattcgcatcaattctatcaaatggaaggccaagtgattgataaaaacattacaatggcagacttaaagggaaccttagaatacacgattcaccatatttttggtgaagaccgtgatttacgtttccggccaagttactttccattcacggaaccatctgttgaagtggatatttcttgtttccgttgtgatggtaaaggctgtaatgtctgcaagcaaactggctggattgaagttttaggggctgggatgacacatccgaacgtcttaaaagccggcggtgtcgactcagatgtctatggtggattcgcctttgggctcggggttgatcgctttgcaatgttgaaatatggtgtggatgatatccggaacttctacttaaatgacgttcgattcttaaatcaattcacacaggagggctagaccatgaaagtttcttacaactggttaaaagattatttagatttaacaactgccccagaggcattggctgaaaaaattacccgaacagggattgaagtggctgatgtcgcgcaaaagagcgcgggcttgaaaaaaattgtggtgggacatattttaagttgtgaaccccatccggattctgatcacttgaatgtttgccaagtggatgttggtgaagatgaacccttccaaattgtttgtggtgcacccaatgtcgctgctggccaatatgtagtcgttgcattacctaattctcggattgctgacaacgttaagattaaaaaaggcaagatgcgcggcgtggtttcaatggggatgatttgtggcttacaagaaattggctttgccgatagcgttgtgcctaaggaatatgttgatggcatctttgtcttcccagaagcaattgaacctgggacagaagtttatgaagctcttgggatgactgattacattatcgatcttgacctcaccgctaaccgagccgatacgcttggcatccacggtgtggcccatgaagtggccgccattgaatcattgacacctcattttgaagatatcgtagtgactgaaagcaacgttcaaacagctgatcaattgactgctcaagttgctgatgaacaattagcaccaagttatcacttgcgtatgttgcaaaacgtgaccgtccaaccaagtccaatgtggctacagacgcgtttatggaatgctggcattcgccccattaataaccttgttgatgtgacgaactacatgatgttaacgtatgggcaacctttacacgcgtttgatgcggatgctctaacgggtgatcacaaacaaatcgaagttcgtttagccaagacgggcgaaaaattaacgacccttgatgaaggcaaacatgacttaacaaatgaagatatcgtcattacagatggtcatcgaccaattgcgctagcaggggtcatgggtggtttgaactcacaaattactgctgatacgaaaaatgtgattatcgaagccgcagtttttgcaccaactgcagttcgtaaaacggctcaacgccataacttgcgttcagatgcgtcatcacggtttgaaaaaggcgtgaatgttgctgatgttcaaacagccttagatgctgctgctatgatgatggcagaccttggtaatgggcaagtgactgctggtacggttagcccaactaacttagtgccaactgacaaagtgattgaaatcgaagctgaccggattaatcgcgtcttaggcacagagattgcaacgcaaacaattgttgaattattagaacgatttggttttagtgtggtcaatactgataatcatttaacagtaacgattccaccacggcgttgggatattgaaatccaagcggatatcattgaagaagtcgctcgtttatacggttacgataacttaccaagcacattgccaactggcgatatgacaaccggggcattaacgactgaacaaaaggcactccgtaaaacccggcatacacttgaaggtgctggtttaacgcaagcaattagttatgcattaacgacccctgaaaaagcgcgtcaatttacgcttgttgattcggcgctgacagcacttgattggccaatgacgcaagatcatgcgcacttacgcatgaacttgattactggtttattggacgatgctgcttacaatgtggcacgtaaacaaactgatcttgcactatacgaacaaggacgggtatttttaaaacaagcagacgaccaagttcggccaacagaaattgaatatgtggctggcttaatgagtggcaatcgccaaatgaagacttggcaagctgccgcagcaccagttgatttctacacaatcaaaggtgtggttgaaatgttgatggcaagttacaacttagcggatgcaatcagttatcaaccaacacaagcttatccagaaatgcatcctggccgaacggcagccatttacgttggtgaacaactggttggatttgttggtcaaattcatccagcagttgcgaaagctaatcatttaaaagaaacttatgttttccaattagatttagcacaaatcctagccttgccaacccaaacagtgattgctaaaccagcacctaaattccctgaagtaacgcgggatattgcaattcaggtgtctgatcaagtttcaaatgccgcaattgttgaagccatcaaagcaaagggtggcgcccacttagtttcagttgaacttttcgatgtttacgcagggagtcatattgaggctggtgagaagtcaatggcttacaccttaacgtacctcaatgaggcagctactttaacagaagaagaagttaacgctgcttttgaaaaagtagtcgctgaattagttgctacttttgatgccaaaatccgttaatctcgaatctttaatgcaatttttgaataatttggtataatgttttaaggattgtatttaaaagagcaattaggaggtcatcctttgaagaaagttgatcaaaaggagccagtaaatcaagaaaaagcggcacaatcattgtacgaagaacgccgtgcagaaaaaaaagcagcaaataaaattgtctattggattatcggtattctattagcgcttgttgtcattattggattcatgggatatcgctacgtacaagcatctcttaaaccatacgacaccaaagcaaaacaagaaattaccgtgcgcattcccaacggctcaacgaataaacaaatcgctgctattttgcaggataaaaaattaattcgaagcgcgccagtctttaattattatgtgaagactcataatttctcggatttccaagccggttatcatgtgttgaaacaatcaatggggttagataagatcatctctaacttacaaaaagaaggcacaccaacccgtcctcgcgatgtgaagggcaaattgttagttaaagaaggggtcactttagaagaaattgcggccgaagttggtaaacaaacaaaattctctaaagcagccttcatcaaacaagcgaatgataagcaattcttagcaagtttagagaagaaataccctgcattattgtcatcaacaatggctcaaaaggatgtccgctatcacttagaagggtaccttttcccagccacttacgaagtttataaagatagtacattaaaagaaattatcaccgaaatggtttcaacgatggatcaaaagatgcaaccttattatgcaaccattaaggataagaagttaaccgttcaacaaacgttaacgctagcttcattggttgaacgtgaaggggtcacagccgtcgatcgccaaaagattgccggtgtcttctttaaccgtttagacatcgatatgccaattcaatctgatatttcagtaatgtatgccttaaatacccacaagacacacctttataacaaagatactaaagtcgattcaccatataacttatatatcaataaaggttatggcccaggaccgtttaactcacctagtttacagtctgtcacagccgtcttgaatccagctgatcgtgatcaaaattatctctactttgttgctaacttgaagacaggtaaagtatattactcaagaaccttcgaacaacataacgatacaacagattcgattgaagattaggttcatttaggattatcgaagtcgaccgctattggaggtcgacttctgtttgcccaaaaagaagttgagaataaaaggagcgtcccatgtccagtcaaaaaaaagcacccatcattatcggcgttacaggcgggtccggtagcgggaaaacaaccgttagccaggctatcgcccaaaaatttgcgaatcactcagtgatgttattaccacaagatgcgtattacaaacggcaagatgttccgtttgaacaacgccaacaaacgaattatgatcatccagatgcttttgacaacgatttattaatcgaacaagcattaatgttaaaaaatcatcaagccattgaacaaccggtctatgattataaaattcataatcggacggaggaaattcaacgggttgaaccgcaagatgttattatcttggaggggattcttgtattggctgatgcccggttacgggatttgatggatattaaggtttatgtggatactgatgatgatattcggttattaagacggatgtatcgcgatatggaaagccgtggtcgaacgtttgatgatgtggttggccaatatcttaagacggtaaaacccatgttccatgaattcattgaaccaaccaagcgttacgctgatttaattgtcccagaaggtggcaataatcgcgtggccattgatttacttgtaacaaagattcaatcaatcctaaatgccgattaaagattgagatttgacaaggacgtacacagtaattaagatagtcagtattattaattaaaataaagaggtggataaaatggtacaaaaaacttatccaatgactgcagaaggcaaagaaaagttagccgaagaactagaaacactcaaaatggtaaaacgaccagaagtcattgaccggattaaaattgcacggagctttggtgatttatcagaaaactctgaatatgaatcagctaaagatgaacaaagctcattggaaacacgcatcgcagaatttgagaatatgttacgctttgcagaagtaatcgatgttgatagcatcgcagctgatgaaattgctgttggtaaaacagttagctttacagacgacgaagatggtgaagaagaaacttaccaaatcgttggtgctgcagaatcagacccattcagtggtaaaatttcaaatgattcaccaattgcccaagcattacttggcaaacacgttggtgataaagtagctgtgcaaacaccaggcggcgacatgcacgtcacaattacagaagttaaataaagtgcgtttcgaacgggttagtctttgaggattaacgtaaaaacgggtgttatggtcgaattttgaccatgacgcccgttttgtagttaaccggaaaaggttgttcgaaaaagcacgtttaagaatagagtgcttttgggtgcggttagcaactgagcattaatacaaaattggcagtcatccagattttaggatgactgccaattttagattaagcagaagttgttgcagccaaaaagcacgtttcaaaaaagccacggaaatcaatcccgtggcttttttattttgccgttaattcgttaatcagccttgagacggattggtgtttatctggtttgcttgtataataatattaatcagttgaaaggagaccgtaaatatgccgtttatctggcgcgtttttttaataatagaagtgattatcttcgggacgttcatttggcagatgattacgatacccgcaaatttagtgttcatcattgcaggtattttactcttagtctgggccaacaaacgtcgtagtaaaggtaaaatcggtgtctggacgactttgttaacgatggtcggttgcgtagctgttacggtaccactgttaattaatttctcgttatggttaatgattattgttgcggtcgtctttttagccttaaatcatagccgaatgggacagtttagcagccgcaatatgaatcagttgtttgataatgccccttggcgcaagaaaaaatttattcccgttaatacgacggaacccaccgcgaaaaagacaacagtcaagcggcatagttggtttggtcatcagacaattggcaataacatttttgaatgggatgatattaacttcgcggtcgctgccggtgatacaattatcgatttagggagcaccattttacccaagaatgacaaccatattgtcatccgtaaggggtttggaaagacacggattttagtgcctgtcgggaccggtgtctatcttgatcactctgcaatgttagggagtgtgacaatcgacaatcagcactataatttgaaaaatgagtcgattcagttgtatagtacaaactatgatgaagaaagtcgccaccttaaaatcattaccaacgtaatgattggtgatcttgaggtgatcttagtatgagcaagttaacgcggagctttatatggatcagcacgagtttgttgacgcttctgttttcagcggcgttattttttgcgtatttctacagtacgcatcaggaacaatggctgattagtttggccacgaagcaattattctatgtaccactgattgtttatattgtggtggccgcaatggcagtaggctttttagttaccgcaatcgtctatcttgtcgtacgtaagcaattatcccatactgaaagccagttacaatttttactttctggacagtatgaatcgcctgtttttcagattagacagagcgaaaccaatgactacgcgatgtcaatcgagcaaacagttgaacaattacgccaaaaaatgatacgcttacaacaagagattcaaagttatagtgatcggccgaccgtgattgctggtgaaaccaaggaagaaattctagcgcaagaacggcatcgtttagcacgcgagttacatgattcagtgagtcagcaactatttgcggcgacgatgatgttgtcggcactcagtgaagttgcgcaaaaacaagctgataacgcgcagatgttgcagtccttaacgacagttgaacgggtgttaaatgaggctcaatcagaaatgcgggccttactcttgcatctacgaccagttaatttggaaggcaagagtttacgcgatgggatcattcagttattgaacgaattgaagaccaaaattgcgattcagattacatgggacattgatagcataacgttaccaagtggcatcgaagataatttatttagaattgtccaagagttgctgtcaaacacactacggcatgcgaaggcccaagagattgaagtatacttgaaacaactcggtcagagtgttttactaaaggtaattgatgacgggaccgggtttgatacgaatgctgagcaaaaagccggcagttatgggttaaacaacattgtcgaacgggcccatagtgttggagggacggcaaaaattattagtttgcctaaccagggaacgagtgttgaaattcgagtgccactattaaaggagaccaattaagtgattaatgtattgatagtagacgaccatgaaatggtgcgattaggcatctcaacgtatttaggggttcaaggcgatattcatgtcgtcgatcaagccgtcaatggtaaagaaggtgtcgaaaaggcgcttgcattacgtcctgatgcgattttaatggacttagtgatgcctgagatggatggcattgaggccaccaaaacgattttaaaggcgtggcctgaagccaaaatcattatcttaacgagttttatcgatgatgagaaagtttatccggcgattgaagccggtgcggccagttacatattaaaaacttctacagccgaggaaattgccaatacaattcgtaaaacggcgcaaggacaatcggttttagagccagaagtgacgaataagatgatgaatcgcttaacacatccggttgaacctaagttatatgaagacttaactaatcgcgaacgtgaagtcttaggcttgattgccaaaggccgtagtaatcaagagattgcggatgaattattcattacgttaaaaacggtcaagacgcacgtttcaaatattttggcgaagttacaagtggatgatcgcacccaagcggcaatttatgcgattaagaaccaactagtcgattaatcaggaggagttcaacatgcaaattcaggtgtcagatgcagcaagtcaatggtttcgcgacgaattagccttacaatcgggggatgcagtccgcttttttggcaaagtgtatggtcaaacggccgtgcatgatggcttttcattgggcatggaacgcgctactgttgagcagccaattggttcggctgttaaagatggtatcacctattttgcgagtcaatcggacgaatggttttttgccgattatgatttacaggttgattacgatccagagcttgaagaacctaagtatcaatttgaacgtcgttagacgataaaaagccccgccaaatcatttagcggggctttttattttgggttaaaaggcgaccagtacgcgcccagttttatgcgtcttttggctaagttctcgggctaaatcagaaaaggcgaccaagttaactgttggccaaatttccggtttaaacgtcgtggcgagtaattgccagagttctttacggtctttgcgcgggtaatagactgaatccattccggctaaggtaatcccacgtagaataaacggcatcaccgttgtttctagggttgcaccagcggcattgccacaagttgctacgaatccgccggcacaaacttgcggtaagatgtgggctaaaacaggaccgccaagcgtatcaataaccccggtgaatgtctgatggctgagcgctttaagcggaccaacagttaggtcagctgtattaataacatgggtcgcaccaaggtgcaataaataatcggtttgttgcaagtcacgcgtagttgccgttagatttgtgaagccaagctgtgcgaggatggtaagtgcgaaacttccgactccgccagtggcacccgtaattaagagtggggtgtcatgatcggctgtaaaggtttggcgtaataatttgctgagcgcaattgcggcggtgaaaccggccgtcccaaactgcatcgtttcagcaagactaagattttcgggcaacttaaagagccattcactagggactttaacatattcagcgtagcccccagcgattgtaatgccagtttcataacccgtacataacacctgatcgcccgcttcaaagaacggattatccgattcgacaacttcgccagcaaaatcaacgccaggcgtcatggggtagtgacgtaagacgccacttttaggattcatagtgagccggtctttgtagttaatatcagaataggcgactttgactaacaccccgtctttagcgaggtctggcgttaacttagtttgataagtggcactgacagtagtgtcggtttgttctaaaacgagtgcttgataggcgaccatatgattacaacctcatttctaaataattatttaactccattatacaacaatgttcgctttgaattggcatcgcgtctcggaaacggtataattaatagaatattagtcaactaataacgagtctgagagtgctaaagataaaggggacgaagaagaagatgcaacaaccaatggtggaatttaaaaatgtcattaaagaatacgacgatgtccaaattttaaagggcatcgacattgcgttggaaaaaggtaagttttataccttactagggccgtctggctgtggtaagacaactattttaagaattatcgccggatttaccaatgcgtctgccggggatgttttatttgaagggcagaagatgaacgatttaccggccaataagcgccaagtcaatacagtttttcaagattatgccttgtttccccatctaaatgtctttgagaatgttgcatttgggttaaatctacgtaaagttaaaaaagcagcgattaaagaaaaagtgattgaagcccttaaattggtgcgtcttgctggatatgagaatcgcgaaattagtgagttatcaggtgggcaacaacaacgagtagcgattgcgcgcgctttggccaatgaaccaaaagtcttgctactagatgaacctctatcagcactcgatatgaaattacgaaaagatatgcaatatgaactacgcgatttacaacaacgattagggattacgttcttatttgtaacgcatgatcaagaagaagccttagcgatgagtgatgaaatttttgttatgaacgaagggcgcgtgttgcaaagtgggacccctgtcgacatttatgacgaaccgatcaaccatttcgtagccgattttatcggggaaagtaacattctgccaggtaaaatggttgctgattatcaagttgaaatggtcggcaagcggttcgaatgtgccgatgccgggatgcgggtcaatgaagcagttgaagtggtgcttcgtcctgaagatctagacattgttgccgttgaccaaggccaattagtggtaacagttgatacgcagctattccgtggtgactattatgaaattacggcctatgatgcggatcagaaccggtggttgattcattcaactaacccagctaaagatggacaacgagtcggcttattctttgaaccagaagacgtgcacatcatgcgttttggggaatcagaagaagatttcgatgcacgacttgaaagttacgaagaggaggactaaggcaattgcgtaaaaaacaatggttatattacttaccatatgccctgtggctaattttgttcgtcctcgcaccagtcgcattgattgtgtaccagtccttttttgatatcaatgggcatgcgacattggtcaactacacgacctatttccagtcaggcacttatttgaagatgacattaaattcgttatggtacgcctttttaattacgctgattacgctattaatcagttatccgacggcgtattggcttcatcaaacgaaacataaacaactttggctattattaattattttaccgacatggattaacttattactgaaagcttatgcgtttatcgggatttttagtcaagatggcgccattaatcatttcttggggtggttcgggattggaccacaacagattttatttacgaatttcagtttcttagtggtggcgacttatattgaaattccgtttatgattttgccgatatttaatagtttagaagaattgaatccatcattggtcaatgcaagtcgtgatcttggcgcaagtaattggcaaacctttacgaaagtcatcttaccgttaacaatggctggggttaaagccgggatacaggccatctttattccatcgttatccttattcatgttgacgcgtctaatcgggggtaaccgcgtgattacgctggggactgcgattgaagaacacttcctcacaacaatgaactggggaatgggctcgaccatcggggtagtcttaatcgtcgccatgggcttaatcatgctggtaaccggggagcaaaaagcaaagaagaaggtgactaacaaatgaaaaaaatgaaatggcaaaacgtttggttagtgcttgtctttgtcttattgtacgcaccgattttctatttgattttctattcatttagcagtggggataatatgaatggcttcaagtcatttacctgggcaaattatcaggccttgtttgaagatactcggatgattgaaattgtgttacaaacgttattaatcgcgattctatcatctttatgtgcgacgattgtggggacgtttggggcgttagggatttattcaacgaagcaacggcgtgtgcgcaatatgattttatcgctgaacaatattttaatggtttcacccgatgtcattatcggggcaagttttttaattttcttcacgttcttaggttttggtttgggctttggttcagttttactgagccatatcgctttttcaattccgattgttgtcttgatggttttgccgaagttaaatgaaatgcggccagcattagttgatgcggcacgtgatttaggtgcgactgactggcaagtcctgagtaaagttattttaccgtacattagttccggcatttttgcaggctttttcatggcgttcacctattcgctagatgattttgccgtgaccttctttgtcactgggaacgggtttgaaacgctctccgttgaaatttactccagagcgcgtcaaggaattagtctagaaatcaacgcattatctgccttgatgtttgtcttctccttaatccttgtggccggctactatttattgaatcaaagaagccaagcccaaaaagtacggcgtaaacggaaagcgggggcttaaaatgaataaattaggacgcatcactttagcgattttagtggtctgtgcagccctttggtttgggacggttgaattacaaaaatcacaaggttatacgaaaaataatacattaacattatataactggggcgattatatcgacccagcacttattaaaaagtttgaaaagcaaactggttatcacgtttcggttgagacgtttgatagcaatgaagcgatgtacacgaagattaagcagggtgggactgcttacgatttagcggtgccaagtgagtacatgattgaaaagatgcgcaaagcacacttacttaaaccgattgatcatcgtcgcttaaccggctatcagaatatcggcaaggattttttgaatcaatcatttgatcctgggaataagtattcattgccttatttctggggcacgctcgggattatctacaacgatcaattggttaaaaaaccactgacacattggtcagatctatggtcaccagattatcgcggccaaattatggtggtcgatagtgcgcgtgacatgatggccgtgggcttaattgaaaatggccagtcagtcaatagcacgaatccggcggttttaaaggcggctaaggacaagcttgatcagatggcaccaaatgtcaaagcgattgtagctgacgaaattaagatgtatatggttcaaaatgaagcgagtgttgctgtgacttggtccggtgaagctgccgagatgttggataataatccccatttgcactatgtaattccagaagagggcagcaatctatggtttgataatctagtgattcccaagacggcaaaacatgaaaaggcggcctatgccttcttaaactttatgttagagcccaaaaacgcggctcaaaatgctgaatatattggttattcaacgcccaatataccggccaaagcactcttgccagcagcaacacggaataacccaggctattatccaagtcaaaaggtgatcgatcgtttgcaagtttatagtgatttatcaccaactgcggttggccgttataatgatttatttttagagtttaaaatgcaacattaaaagtacaatgagcagattgaaatggttcatggtataatagatacagaatttttttggatggaggttacctatgtcatttgaatggtcacagttattaacgtggcggatgctcgcaaatgtgctagacatcatcgttgtctggtattttgtgtataaattaatcatgttgattcgcggtaccaaagccgtccaattgtttaaaggtattatcgtcattgcgctgattaaggttatcagttggtacattggtctacgaactgtttcatacattatggatcaatttatcagctggattgtgattgcgttgatcgttatttttcaacccgaaattagacgtggtttggaacatatcggacgtggatcgctactacgacgcggcgttaatcccaagattgaacaagaaaataatttaattaaagccctcgataagtcgattcagtatatgtcgaaacggcgtatcggggcgctgattacaattcaaatgaataccggtttggaagattatatcgaaactgggattgatttggatgcggatgtgacgggggagttattaattaacatctttatcccgaatacaccattgcatgatggggcggtcataattcgcgatgataagattgccgttgcggccgcttacctaccactttcagagagtaatttaattcccaaagaattagggaccagacatcgggcagccgttgggattagtgaagtaacggatgctttgacgattgttgtttctgaagaaaccggtggtgtcacattaacgcgcaataacgagttaatgcgtgatttaagccgtgatgattatatgaagtacttcaactcgcatttgattacccaagaggaaaacaaaacgagtctcttacaagaatttgttgatggcttcaaaaaaggaggccagaaatgatgaaaaagtttgttgaaggcccatggctctatcgaattttagcgttatttctagcgttgttactgtttggttatgtcaatttggatgaaattaacacgacgcgccagacgaataacaatgatacacagatgctagcaacccgcacggaaaccgtaaaagtgccgctccagattaatgcggatactggtcggtatttcattaccggctatccacaaaaggtcaaagtgaaattatccgggccgaatgcgctagtcacatcagcagttaacacattaaatttccgcgtgattggcgatttaacgaagctgggtcctggtgatcacaccgtcaagttaaaacagacagggattaataaagatatcaaagtcacgattgaacctaaagaaattaaggtccacattgagcacaaagtgacaaagcaattccctgtgcaggtcaatgttaagaaagaaaacttagcggccgggtatagtctaggaaatccaaaactaagtcaagacgtggttgaagtcagtggtgcaaaatcagcagtgaatgctgtgtcgcaagtagtagccactgttgatcccgatgaaggcaccaaaaaagacatcaatgaagaagtcttgttgcaagctgttgatcgcaatgggaaagcgttaaatgttttaatttcaccacaaaccgttaacgttaagatattggttcaaatgagtaagaaaacactcccgattagtttggaaaagaccggtgaaaaaagtggctacagctacagtctgtcatcaacaactgattcagtgaccgtgtatggtcgtcaaacagctttagccaagttgacgtcgttaccagtgagtgtcgatttatcgtcaatcacgagttcaacttcaaagacggttaaagtggctttaccagacaacatttatgagagtacgccaagtgccattaaggtgacaattacggtgactccagatacgaccaatacgagtgctactaatactgttgaagcgccgtctgaaagtacggcacaaacatcaagtagtgcgcccgttgagtcaagttcaagtaacagccaatcaagtagtcaatcaagctcaagtgaaagtagtaaagcaaataccgctgtaaatcaataatcaacgctaaagattttagcaagatgaatggagataattaaatatgacaaagtattttggaactgatggtgtccgtggcgttgccaacttagaattaagcccagaaatggcttttaaattaggacgtgcgggtggttacgttttgaccaagcacgctgataaggatcaacggccaaaggttttggtggctcgtgacacacgtatttcaggccaaatgttagaacaatctttgatttccggcttattatcagttgggattgaagtcttatcattaggcgtggtgacaacacctgcggttgcctatttaattaaggttcaagaagcaagtgccggcattatgatttcagcctcacataaccccgctatctataatgggattaaattcttcggcgcagatggttacaaattaccagacgcaactgaagaagaaattgaagcaattattgatgccgaagaagatactttaccacgtccagaaggcgctggtctggggacggtggaagaatatccagaaggtgctttgaagtatacccaattcttagaacacacgattcctgatgatttagctgggattaaagtggcattggatggcgcaaacggttcaaccagtggtttaattagccgcgtatttgctgatctagaaacagaatttacaacaacggcaacccatccagatggtttgaatatcaacgatggtgtcggttcaacacacccagaaaatgttgctaaaagagtgcttgaaacaggcgcgcaagttggactagcatttgatggtgacggggatcggtgtatcgcagttgacgaattaggtaatattattgatggggacaagattatgttcattctcggtcaatatttatctgataagggtcgtttaaaacaagatacgattgtcacaactgttatgagtaatatcggcttgtataaagcgattgaagccaacaacatgcaatcagtccaaacagacgttggggatcgtcacgtcgttgaagaaatgcgtgaaaaaggctataaccttggtggcgaacaatcaggacacatcatcatctttgattaccacaatacaggtgatgggatgttaaccgggattcaactcttaaacgtcatgaaacaaactggtaagaagttatctgaattagcagcccctgttcaaacttacccacaaaaactcgttaacttaacagttaaggacaaggatgcttggttaacaaatgacaagatccaagctgccattgataccgttgaaaaagaaatgaatggtgatggccgcgtcttggttcgtccaagtgggacagaaccattgctacgagtaatgtgtgaagctgcaacagaagaaaaagtaaatcaatatgctgatcaaatcgcagcggttgttaaagctgaaattggcgcataattaaagggagtgctgacgcgagttggttaggctttgaggattaacagtaaaatgggggttatggtgtttcttgccataatccccattttgcagttcaccggaaatgactactcgagaagcgcgttcaagttggtcaacttttgagcactagcttgaaaagcacgttctcacttgaatcaaactaaaaaagcccgtcaacattgtgttgacgggtttttttggtgcaattttatttaagagcccattcttctaacgcaatgtgacttgttcgtacatcagaaaaccaaagacaaccaataagacaacagcagcggatatcagataccattctttgacaagtatgataggtgcatcagtcagatgataatttttgcggtaacgtttgagattgaaaacactgacttcattcacgatgattaataaagcgggttctaatagtagcatgtatttactaccggttgaatcgacaatgttattggcggcaatatgtaaggcgattgttttaggtgcaacgacgataaagctcagtccgactaataggccaagaagagaaatacttcgaattaacaagatgctctttttcattacagaaactcctcgtaagatatatttataagccgttggcttacaataaaatttaattattactttgatactgcgggattcttcagaatataataggaccatggaatggatctatcgggaatttgctaaaaactcctgtagttaactctactttagtaagtccgttacccgagtctttacgctctctcccaactcactagctgttttcaatcaggcttatcttcaatgtagtagtttgaaggcggcataagtccaattggtcaaaattctgttacgcgaggttgtagctgtgtaaagattttctggggaatcccgcagtatcaaagcaagttccaaataactctcgaaaggaggtccttcctgtgaaattatttgttggtttagatattagttctgaaaagattgatgcttgttttatgactgatgatagtaacttatcaatcctaaatcgtttaagtgttgctaacgatttaaatggtgcttctgaaattaaagccttaattttaaaacatcacgcagaagtatcatttgaacagattgtgattggtatggaatcaacatcactatatagttttcatccagctatgtttttccaagaagatgcagacttaaatgcactaccaacggtagtcactgttgaaaacccatttaaaatcaagcaatattctcgtgtcttcgatgaagacaaaactgataccaatgatgccatgcgaattgctgactacttacgaattcaacgttttacaacgtcacctatcaaagaagaaaaatatatggcacttcaacgtttaacccgtactagatatcaactagttaccgaattagtaacggttaaacaacatttcttagaaaacttaacttataaatgtaatacgcttagtaaggaattaaaatcagaatctaccggcatttttagcgccacaattgtacatttaatgactgaaaactactcattagatgaattagccaatttaccactagaggacttcgtccaattgattcaaaatgttggccgcagtaactttaaaaatcctgaaaaactggttaaaaccattcagcgtgccattaaaaatagctatcagttgccgcgattaatgaatgagtcgattgatattattctcagtaccttggtagttcaaatgcgttcattacagcaaagtattaaacaaattgataaaggtatcgaaaaactagttgaaataattcctgaatatcaatgcttaaccagtgtgccaggaatcggtaaggtttatgccgcaggtatcttagctgaagtcggtcaaatcgaacgatttgatgatcaagcaaaagtcgccaaatatgccggtctatcctggaaagttaaacaatctggaaattatcagtcagaagtcacaccactaacaaaacaaggtaatcattatttacgttattacttagttgaagccgccaactcggtaaaaaatcacttacctgaatacacagctttttataaaaagaaatataccgaaaccccgataaataagcaccgccgagctattgttttaaccgccagaaaatttgtgcgtttggttgatgcgctactacgcaatcaccaactttacacaccaccaaagagtgtgttgaaggaataacgtagttattcacgcaaatctttggaatacctactaaaatttttatgaattttaagtaggcttagtttagtgttgccaattttgtaaaattacacgatatttatatcaattatcttcttgacttattaccactagacttttctaaaattgactggtcttagtatagcataaaagcgctagatagcggaaaatatttggactataccaaaattataaatttatatataccaataaaaatgttgacattaaaatcgttggtgctattatatttaagtgttgtaccaattgattaaagaatattaaaccaaagttgaaaagaggatttttataatgtgtggaatcgtaggcgtaattggcaatgaaaagacaactgaaattttattaaacggattagagaagttggcgtatcgtggttacgattcagcgggcatttacgtgaacagcgaaactgggcaggactacttagttaaagaacccggtaaaattagcgttctagaagcagcggttgggcctgaagtacaaggaacaatcggtgttggtcatacgcgttgggcaacgcatggtgttgcgagtcgtgataatgcgcatccgcatgtttctgaagatggtcgtttttacttggttcacaacggcgtgttaacgaactatttagctttaaaagaaacatacttggaggatgtccattttgtcagtcaaaccgatacggaagtcgctgttcagttgattgcttaccttgctaagacagaacaattatcagctaaggaagccttccggaaggctttaacgttgattgaaggctcatacgcatttgtcatggtcgatcgtgatgatcctgacaccttatacgttgctaagaataaatcgccattgttaatcggtgtaggtgatggctttaacgttgtgtgctcggatgcattagcgatgttgaatgaaacaaaagattttattgaaatccatgatcgtgaaatggtgacactcacgaaacaaagtgttcaaattgaagatttagacggcacttttattcaccgcgaaagctaccatgttgaaatggatgctgatgcagtgggcaagggcacatacccacactacatgttaaaagaaatcgacgaacaaccagctgttatgcggcgtttattgaacgaatacgttgctgttgatggagagcttaaaatcgactcagcgttactcagtgcaatgaatgatgcagatcgcctctacatcgtggcggctgggacaagttatcatgccggtttaatcgggaagaccttgtttgaaacattaacgcacaagcctgtcgaagtacatgttgctagtgaattcggctatcacatgccgctattatctgaaaagccattctttatctttttaacacaaagtggcgaaactgctgatagtcgccaagtgttggtacaaactaatgccttgcattatccaagcttaaccatcactaacagccaagggtcaacactttcacgggaagctgattatacattattattgcatgcaggccccgaaattgcggttgcttcaacgaaagcctacactgcacaaattgcagttgaattattcttagctgttgcactcggacgccacaatcaactggtgctagcagaacaattcgatgtacatcatgaattaggcttagtcgctgctggcatggaagctttattgagcgaaaaagaacagattgaaaccttgacgactgattacttacaaacaacacgcaatgccttttatattggtcgtggtgaagattacgccttgagtttagaagctgctttgaagttaaaagaaatttcatacatccaagctgaaggatttgcagccggcgaattaaaacatggcaccatcgctttgattgaagaggggacacccgttattgcattcttgatggatgctaaaacgattgcgcacacgcgtggtaacttacaagaagtgactgcgcgtggggcaaaagccttgacgattgtcagcgaagaatctgctgaagcagatgatcagatcattttaccaaccgtaaacgacttattgacaccattattggggatcattcctggtcaattaattgcttactatgcaagtttgcatagagggtatgatgtagatcagccaagaaacctagctaagagtgtcacggttgaataaataatattcaaaaagcctcgttcaaagaacgaggctttttttgcgtttaatgagttggtgcatatgttgctcgaggaccgccaacgtattttggtcgtgaccgtaaagctgtgacatgtgcactacccaatgtatcaagggttgggcggacagggacttgaacgaatttcacgtgcatcccaatcgccgtatcaccgatatctaatccagcttgtgcaacgatatgttcaacttcaaccggatcactgaattgttcaaatgcagcgacggagcaggcgcctccagcgtgcatagcaggaacaactgagacaatttcaaagtcgtgtgcgcgggcaacctgacgttcaatcaccaaactacggttaatatgttcacagccttgcacggctaaatgaatccccaatggattgagaatgccaagaagtgttgcgatgatgacttcaccgacttctttgctagaagccttaccgatatgaccaccgacgacttcactcgttgaacacccgaggacgaacaaatcaccatttcctaagtgtgcttcgtttagaacatcctgagtcatctttgttaagtcttgttgaatttggtttaattgtaattcgtttgtcatttaaaaaatctcctagtggttaaataattgtggtcgaatacgggataaactagtgactaacgggatggtaaccacgataccaagtccattttgaacaatattactgaaaatcgaagcgattccggcagcccagccgaaaagtaaactggtagctaaaaagtaaccggcaaccatgacgatactaccgcaaatgagggggataatcagctgctttggtcgcattgaatcattacgagtcaggtgacctacaacgaagccttgccccccatgaatgatgagtgagaagagacaccactcagggtaaccagataatagatcgattaataggccactcagggctccgacagtgagtccgccaggatttcgcagcatgatcgccgttgtataaataccgacctcacagagcgtcacaaagcccttcgtcgccggaatcgggatgatgattaacaaagagagtgccacggtcaatgcggtgagcatcgcgagtaatggtaattgacgtttattaaagtgcatgtttagtagccccctgccagacattccccaggccatggcgtagatgaataccatcttttaaaccggcataaacaaatttctttgcgcgtgccacggcaacttcaatcgattttccttgtgctaattccgccgcaatcgctgccgaaagcgtacaaccggcgccatcaatggtagttgtttccaatcgtggagcttctaaataatgagttgttgcgcccgattttaataaatcaacggcctgctcaccagggaatcgttgaccacctttgataatgacgtgcttggggccaaatgattggataattgtagcagcttcgaccatttcctcacgcgtggtaattgacgaaagaccactgagttgttgggcctccaacaagtttggggtgacaacgctcgtcaaaggcagtagttctttttttaacgtgtcgaggtacgcttgctgcgcaagaatggcgccttctttaaagacgaggaccgggtcagcgatgatggttaattcaggatgctgtcgtagtcgctcacagatggcttttaaagtttccgtttgatgaaccaaaccaattttaacgtgcgttagtggcacgtagtttaaaatggcatcaagctggtccaaaatggtatcctcaggtaagttgtggattttcaagtgaccgtctggtagcaatgtagcgatgcaagttaaggcactgaccccaaacgtttctaaggcctcgaacgtttttaaatcggcctggatgccaccaccacccagagtatcagagccggcaatggttagaatgttttgcatagttgtcctccaaaattctattcttaactatcatagagaagaatagaatgttcaacaacagccaattggcttgtttttttaccatccaatttgtaaactaaataagaggtgttaaaaatgattgaatggttacaatatttacctgaacaaaagccaaagtatatggcaattaaaaaaatgattattagcttgatagataaaggacaattaagttcaggtgaccaattaccgccagagcgtcagttagctaaattattgagtgtcaatcgttcaacggtgacacgtgcgtctgatgaattggttgcagatggcgtgattgaacgtcgcgttggtagcgggacgtttgtcagccagcaagcgcgaccacaggcaaggcgggtcaattggcatacttatttgatcagccaacgtcagtcacaaagtcaaaatgaacggcgccaattacaacaactgattagacgaaaacctgaaaagttaattgatgtttattcaagtgacttaccattagaattagtcccacaatttcaatttcctgcattgacgtggcaagattttattactgcacaagcattagagacaccacgaggctatcaaccacttattacggcaattaatcaattggatcaacacaataaacggctattttttaccgaagagcagttattaatgactgccggtgtgcaacaatcactctttttaatattacagggtttattgacgccaggtgatgctgttgcaattgaatcaccctccttttttcatgactcaactttgtttgaagcgacgggtgtccgtgtctatgaagcttcagttgatgctgatgggatttctttgactgctttagaagagctaatcattaagcaccgtgttaagttggttattctcaatccagattatcaaaatccaacggggcacgtaatgagttttcaaaaaagaaaagcagttgttcatttatgccagatgcatcaaataccaatcgtagaagatgatgtctttggttggttaggatttgatacaactaggccaatcccaacgttaaagcaacttgatccggataatgttatttatattagttcgttgtccaaaattatgggggctagtagccgaatcgggtgggtagctgctactccgcaagtcatcgaacagttgacccgcgtgcaacatgaaatggatttagtgccaagcattatggcgcaagtcatggtgaccttagcgatgggggatccgcaatttcaaacgcagttggatcaacttaaggggacgcttcaagaacgtgcacaagcaacctataagatgcttgaaagggtattacccgattggcacgtttacttaccagcgggaggttattatatttgggtgacccatccgaaccataaattacgcttaaaaacctttattgatcatcagcttgctgtcgcaccaggatcattatttgggcttaaaacagatgcgttgcgcatcaattttgcgcgattaaatgcaattgatttggtcgtgctagaacaacgattagtagccattattaaagcaacagaataaagagggggattcggatgacagagcaattcgtaccagagatttatacaccattaaaaaccagtgttgtcggaccacctgctgtggcgcgacaagttggggggattaagatcctcggtaagaagattaaaacaattatttttaccaccgatgttgcgattgtgaataatacaaatgctgacgctgttttggcagtttatccatttacaccacacccagctgtcatgaatgccatcagcaatgtggcgacgatccccgtttttaatgggattggtgggggcttaacggccggcagccggtccgcgtacatgggattattggcagaggccgccggttcgattggcgtggtggttaacgcaccgacctcggtggagacgattaaaatgattaaccgcgttgttgacgttccgattatttgtactgttgtgtcagaacaacaggattacgccgcgcagattgaagctggagtttcaattttaaacgttagtggcgcggctaaaaccccagcaattgttagtgcaattcgccaacaatatcccgaaattccgattatggcaactgggggtaaaaacgaagctagtatattagcgacgattgaagcgggtgcgaatgcattgacgtacacgccaccgaccaatggtgagttatttgctaagaaaatggccgactaccggtctgatttagcatgataacagttgacgtgctatgcaatcctccgtatgataaaaagattactagaggaggtctttgaatgattcgtcaagcaacagttgcagatgccaagagtgtcttaccaatcattaacattgtttttgaagaaatggaaatgccactcttccaaaagattccgttggaggatttatttggtattttagaacaggcctttgcaatgcctgaatatcggtatagttatgctaacacactagtttatgaagaagacggccaagtattggggattgttgtaggcttcccagaagaaaaggaagcccatatcgacgatgcattagcaccgttattcccacaaatcggcttacctgagacaacgcgtttctttaccgataaggaagcacaaccgggggaatggtatttagatacacttgccgtcgctgaacatgcacaggggcatggtgtagggacaaagttacttaaggccttaccagattatttaaaagcacgtggtgaaaaaaagattagcttaagtgtggatttacaaaatcctggcgctaaaaaactttatgaacgaatgggttttgttaaacaaggagatttaatgattggtgatcatcaatatgatcatatgattaaacagctttaacacgaaaagagccgacaaaaattgttgtcggctcttttcagattaaagtaatggcataatcattgtcgtccatagccagctcagtggcatgactaagatcattgctggtatcatgtctgcaattggaaattcgcgaattttagcaattctaaagccagtggcgagcatcaagaggccgccgcaagctttgaaatctgcaagcattgttggattcgttagtgggaaaatgagtttggcgagtaagaaaatgatgtaaaagataatgaattgcggaatcgcaatggttgaaacgacggggccaagattgcaggcaaagatggcagcagtaaagaaatctagaattgatttagaaattagaatcgtattgttgcctgtcataccagcatctaatgtcccataaataccggtcccaccggcacaaaagaggacaatcactgtcacgagtgctgaaataaattcggtatctgatagcgtattgtttttacgcggaaaaatttagaaattggccgttccatcaagacggcaccgcgatcaatccagcgaccgaagtgaatgagtaggccaatcccagtaccgagaacaactgcgaagatgactgcaggcatgttcttcatttgaataatggcattgatgcccattcccatcgaagcaacaccgaagattaaggtgagttctgttttaaatttagttgataatttatctcccaataaactaccgaatagaccgccaaataagacggataatgaattaataatcacgccagttggcattgagaagacccctttaattttaagtttgcatattcaaccataccaatttaaaagaaaagaatcaatttaattttaaatgttagcgcttatatatattcgatgggagtcttgagctagaccaaaaaacgactaatcatttgattagtcgtttttttactgactattcgaatcgcaaactaggcttaaaacgccgaatcagtgccttgggttggttataggcccaatgatttaaaacggcggcaatcaaaatacaggggacgatatccttttcttggttgacagtcaattgaaaggctggaccgctgcttgctagaatggtggtcgcttgcatgatgggttgtgtatggtagataatgcgatattgattttgcgttaaatctcccataattaaccaattaagttgtttgacatagataaactcatgccagacgccccagatctttttgagttgaccaatccgttcatcgttttggaaaaggtcaaagtcaggtgaggggctaattgtgacttggcgaatttcaccgagtaagtcgccggtgagtgagtaaaggctgaatacgtcatgccgaatcccacgctttccaataagtaaataacgcggttgttcttgatcgtcaatcacggttgagacaccacgtgaagcactagcctggtgtttaatgtagaaaataggcatcaaagatcacttcttttcagctgtacgattcaagtcaatcgcgtgataaatcgcttgtgcgacgccgtcttgaatgttagttgcagtttgatagttcgcaagttccttaattgttgggacagcattgcccatggcgacaccaatgccagctgttttgatcattgaaaaatcgtttaagttatcaccaattgccattgtttgctcaactggaatccctctttgttcagcataggcggccaaagcgatacctttttgagcgtcaatgtggtttatttcgatgttattacttgaagaggaagttacaactaaatccccgcgggcttcacaaaatgccttaattggtgctaattcggtcattccctgtgtgctaaaagcgatgattttaagaatcttaaccgttggatcgttaataatcccttgatagtgatcatcgacgtagttaatattcattaattccaaacgggctgctgctaaagcaaccgcaattttataactcgtatcgggattgaggttgacgagtaaatcagcgacattttggatgcgactgactttgctatctgaataattaccggcagtcgtcatgagttcgaagtaaatattattttcgcgtaaattttctgtgacggctgtcaccgtttcggaatcaatcggcacattcaaaacttcattacctaaagaatcaaaaacttgggcaccattcatcgtaattaaagtaggttggatgtcatcactgtcaattagggggagggcttcagaacgactgcggccggtagccaccacgaattcgatgccggcgtcttgggcagctttaatggcggtcatgttaccgtctgaaacctgcattttgtcgtttaataaggtaccgtccatatcagatgcaataattgaaatcaaaggaattcctcctgaaaacgtattattagaaacttacctctatcttagcatgcaagctacttttcttctagcaacttatgttaaaacacgataaactagttaatgaggtgagcagatgaaaacaattattcacaatgagtggcaaacgattctcgcaccagagtttgccaaaccctattatggtcagctccatacctttttgaaacaggaataccaaacgaccacggtttatccagagatgcaccatattttccaagcctttgaatggacaccgtttgaacaggttaaagtcgtcattttaggacaagatccttatcatggcccgaaccaagcccatgggtgtagtttttccgttttaccaggggtcaaagtcccaccatcattgcaaaatatttataaagaattgcagacggatgttggctttcaaccggttcagcatggctatttaaagagttgggcggatcaaggcgtgttcttgttgaacaccgtattgaccgtgcgggcaggtcaatcaaattcgcatcgtaaacaaggttgggaacagctaacggatgcggcgattgctgcattgtcaaatcggggacatgtggtcttcattttatggggaaacgcggcaaaggataaacggcggttaattgatgagacgcaaaatgcggtcattactgcagtacatcccagtcccttgtcagcctatcatggtttctttggctctaaacctttctcacagacgaatactgcccttgagcaatggggcatggcgccaattaattggcaattaccacaaacagtcacggcagaataatgaagcgttaccattattgacttgtcgcggtattagaaacgttgtatgattacattagcaataataaaatgcttactggaggttgcaattgtggatttatttgaaagcttaaaagcaaagattaccaatcggcaatttaaaattgtttttccggaaggaacagaaccaagaattattggtgcagcagcacggttgaatgctgatcggattttgaaacccattttaattggggcaacgaatgatattcaacaaatcgctgctgctaaaggatttaacttggacgggataacgattattgatccacaagaatatccaacagctgactttgaaaaaatggttgccgcttttgtcgaacgccgcaagggcaaggcaacccctgaacaagcacaaacaattttacaagatcctaattattttggcaccatgctggtttatttaaacttagccgacgggatggtttcaggtgccgtgcattcaacaggcgatactgttcgaccagcattacaaattattaaaacaaaaccaggtgtccaacgcacaagcggggccttcattatgcaacgcggtcgcgataacgaacgttacttattctcagattgcgccatcaatattaacccgaatgcgcaagaattggctgaagttgctgtggaatctgcaaagacggctgagttgttcgatatcgatccgaaagttgcgctgttgagcttttcaacgatggggtctgcgaaagcagacgaagtcacgaaggttcaagaagcagcacggattgcacatgaaattgcgccagaattagacattgatggtgacctacaatttgatgccgcatacgtaccagttgttgcgaaccaaaaagcaccagattcaaaagtggcgggtcaagccactgtgtttgttttcccagaattacaatcagggaacattggctacaagattgcccaacgttttgggaatttcgaagccatcggaccaattttacaaggtttgaatcaacccatttctgatttatcacgtgggagcaacgaagaagatgtttacaagttagccatcattacggctgctcaagcattacaaaactaattgaccgacaacaaagacgccagcacagaaaaattgtgctggcgtctttgactttgcgaacagggcttttttcggtataatgacacacagataacaattagaatgaggcagaacatgttagaatttaaaacaactgatccagaacaaacaattgcgattgccaaacagttgggccaacaagtccaagccggtgatgtcttgttgttggatggtgatttaggcgctggtaaaacaacgtttacgaaaggcttggcagctggtctgggaattgaccgctatattaagagcccgacatttacgttaattcgtgagtatcaagacggtcggttaccactctatcatatggatgtgtatcgattggaagaaacgggcgccagtgatttaggcttagaagagtattttgatggggacggggtttcggtggttgaatggagtcaatttattgctgaagaactaccgagcgattatttgacgattcattttaataaggatgttagcgatgatcaagttcggacgttagtacttgatccgcacggcgctcactacgaagcattggtgcgtactagttttgcagactagtgtaattgacattcggcccgcgcaagcagcagatgcgcgggcttatttatgctttctaaaggcggtcgctaaagaaacaccgtatgttgcgttaccagcggagttagccactttaacaccattatttactgaatttttgatagcaagtattcttgaatcgcaacaagatgtattattgcttgcttttgatcaacagcaaattgtcggggcaattcgtgtgaatagtccgacagaacaggggctaacacatatcagtgaagttagtatcgctgttttaaaagcgaagtggcatcgcggaattggctctgatttgatggcgcaccttttagcgtcggttcgagaaataggaaatccgcgacggcttgagttaacagtacaagcccgtaatcaccgtgcaattgcactttacaaacggtttggttttgtgaccgaagcacaattagcagccggattttatgcgccagaaacgggctatattccggttgtgcaaatgtgccaattaatgaatatggatgaggagatttaagatgcaacaacaacgaggacgcggaatttacttagccgtattaggatcaatattttgggggattcaagggccagtatcacagtggctattcattgacacggcaattaagccagaatggctaatgggggttaagatggggctttcaggcctatttctattaggttatgcgctcattaaacaaccgaacgatgtttttacagtgtggcggcaaccgcgggactttacgcggatgttattatttgcagtattagggttatcggccgttcagtatttttattttctaacgattcaagccagcaatgcaccaacgactacgattttacaacagctaggcaccatcatgatcatcttaattagcttggtgatttatcgtagagcacctagccgcgttgaactaattgcagtgactgtcgcattgttggggacgtggttgttagtgacaaaaggacaactgacgcatttggcgatttcacacgcggcattcggacttagtttatgccttggcttttccggcgctttaaacacattaattccggttaagttattccaaaaatatccaacattagtgattgtgggctgggcgatgttaatcggtggggtggtcttcacatttgttcatccattttgggtcggtgttccaccgttgaatgtggcaacaatcagtagtgtcttattcattgctttgtttgggaccgcgctcgccaatctttgtttcttggggagtttacggtatatcacaccgacaacggctggtttattgaatacctttgaaccattagctgcgactatcggtactgttttattcttgaaaacgagtttcaacacctgggaagtcgtgggtgggattcttgtgatcagtacggtgtttatcttgagttttggtcaatctaagtcaaaataagttaacacgatgaaccgaattgtggtataattaacagcgaaacaaagctcgtacattagtcaaaacaaattaatgattatgatgaagttgttaatcttgtcgaagccctaatgacaatttagctttaatccaccattcgctaaaagagcggttagcctgtctgcatagacaagttaaccgctctttttttgttagccgattaatttggtggccgcttttagcggttcaacgccaaaatcgttggcttctttaatcagaatcttggcacaagcgatactatcagccagtgcattgtggtgattgtcaagtggaatcgctaggttatcacacaaggtgtttaacttatgattctcaaattgtggatacaaccgccgactcgtcttgagagtatccaacgctaaataatggggttctggaatgtcgtagtgttggagtgtacttttcaacacaccaatatcaaaattcgcgttgtgggcgaccactaacttgtttggcgtgaaaaatggtgcgatgtgcggccagacttgattgaacttgggcgcttgagccacatcggcttcatgaatgccatgaatttgcgtattgcgactgctaaaataagtttcaggtttaattaacgtataaaaactatcaacgatttgatcgttgcgcacaacaacaagggcaagtgagcaagcactatgctgttgaccgttggcggtttcaaaatccattgcgacaaaattcattattttgaacctcgctttttataaagtttgcttattttaagcgaataaatcttgcgtgtcaagttcgacggggcagtggtcggaaccaaaaatttccgtgtgaatcttggcatcgactaatttaggttggagatcattggaagtaatgaaataatcaatgcgccagccggcattattgtcgcgggcgtggaatcgataactccaccaagaataaatatcgggttgatcaggatagaaataacggaaggtatcggtgaagccgcgatttaagagggttgtcatttgccctcgttcttcatctgaaaagccggcgttatgatgattggtcttatcatttttcagatcaattggttcatgggcaacgtttaaatcaccgcagaaaatgacgggtttttgagtcgataaatcagcgatataagtttgaaaggcattctcccaacgcatgcgatagtctaatcgtttcaacttatcctgtgaattgggtgtgtagcaagtgattaaataaaaagtagggtattcaagtgtaatcacgcgtccttcttgatcgtgttcaggttggccgataccataagttgcagtgagcggtttatgcttagtgaagatggcagtaccggaatagccttttttttcagcgtaattaaagtattgatgataacctggtaaatctaattcaacttggccggcttgcatcttagtttcttgtagacagaaaaaatcggcatctagttgattaaaagtggtcataaagtctttttttaaaacggcgcgtaagccattaacgttccaagaaataaatttcattgtcgatccctcatttctaaactccattttaacggtctagtcaataatacgcaaaaaaagtgttggctgttcaattcaagccgtctttgttaaactaggagtagattattttttgaggggaacgacaattgtgacaagtcaagttgaagtatttttacaagcaaaccaagcaatcgagattcatcaagcagaaccattgagcttatacacctttaccaaaacaggtggaccggcagatttactcgcactccccaaatctgttgcagaagtgcggcaattagtggccagtgccaatgaactgacattacccatcacaattatcggtaatgctagtaatctaattgttcgtgacggtggcattaaaggcttagtcatcatcttaacggcgatgaatcagattaaagttgaaggtaacttggtgaccgcgcaagctggagcagggattattcaaacctctgaagcagcttatagcggtagtttgaccggcttagaatttgctgccggcattcctggtagtgttggcggtgcggtctttatgaacgccggcgcatatggtggcgaaattagtgatgtactgacccgcgttgatgttttaatgcgcgataatcaagtacagacgttaacggccgctgacttagacttcagttaccggcatagtttaattcaagataacggcagtattgtgttggttgcctattttgaaatggcaacgggtgcggcaccaacaattcgcgcccggatggatgaggtcaacactttgcgggctgccaaacagccgctagaatatccctcatgtgggagtgtctttaaacgaccagtcggtcattttgtcggaccgttgattcaaaaagcgggcttgcaagggcatcaaattgggggcgcacaagtttctaaaaaacatgccgggttcatcgtgaatattgatcacgcaacggcaacggattatttgacgttgatcgaatacattcaaaaaacgatctgggcgaagtttaatgtgcgcttagaaccagaagtccggattattgggcaacataagcaaggttaaatcaatgatgaaaagctatggtaaaagatgattttatcagggcttttttatcaggatgagcgttttaaaaagaaagggtgttgggatggcaattattgaagctgttattttgttaattacgttggtgattattgccaatatcatcgggcattatttgccaaatttaccggttagtttaattgagatcgggttgggattaatggtggcgttagtctttgccgtcaagattccactaaaaacagattggttcatgttggtgtttgttgcaccattattgtttaacgatggccgtcgttttcctaagaaggaactatgggcgttgcgcggaccaattattgggaatgcgattttcctcgtctttgcaacgacgttaattggcggcttggccattcattggttagtcccggcgttaccgctggctgcaagttttgcgttagcggcaatcttgtcgccaacggatccggtggcggtacaatcgatttcagaacaggccgatttaccgccccgggttttgcacttagtgagtggtgaaagtttaattaacgatgccagtggcttgattagctttaaatatgggattgctgccgctgttaccggctatttctcatggcaacaagccgcgggcgattttctgtatattagtattgttggcgcactagcggggatgattatcatgttaatcattcattttattcgcctatttatgctacaacaaggctttgaagatgtgatgttccatacgattttacagttggtgacaccgtttatcatctatctaattgttgaagatctattccacgcatccggtgtgattgcggtggtggtagctgggatcatcagtcattcatcacggaatatcttcctcgattttttaccggagttgaagttagtgaccgaacaaacttggtcaatcagtgtttacttattaaacgggattgtctttttaattttagggattgaattacctgtcgctatgcataataccgtgcataatccgctgattaatacgagtgaagaaattctcctcgtcttagcggtttggttgattctggtgattgtgcggggactctggacactagcttacttgctctacaccaaccagacgaatcccaaaacattccgcgaaaacattaaaattgcggtgctctctggactttctggggttcgtggagcgattacgatggccggggtattatcggtgccaactgttttagcggatggttcaccgtttcctcaacgcggcttaatgctctttattgcggccggcgtgattattgtcagtctggtgatggccgttgtcttaattcctaagctgacaaaagtcaaagcaccaatcgagatgcgagggatgcaacgagatcttgaagccgaagcagccgcagaagatgaagcagctgctgatttattggatgaaacaaacgctaagatttacatgtacaaagtagcagcgagcatggtcgaatcccaacggcatattgataataaccgggctgctttagatttattggcagagtatcagttgatgatccgccggttggagagtcaacaaagcgaagcaagcacaagtgacgaactaccaccgttaattgctgaagagttgattttgcgacaagtggcatttgacggagaacgtcagaagttagagttgttatgggctgaaaaggccattagtgctaaaagctatcggcatggtaaacgtaagttacggcaaaaacaagtaatgttatcggttattgggacgagttttaattggcatcatgtgcaactacaagtctatcgtgcttggtcaatcagcaaacgctttttgacgcatctctggccgcggcatatcaaatcaccaagtgaaaccgagtggcaattgactgaacgtgaaatggctaaggcgggaattaaacaattgtcgtatttcctaaaacagcctgaaaatcgccaacgtcattataatcgtcaggttatttatcaaattattgtgcggtatcggaatcagattgaaaacatgaaaaatggggggcggagtaagaccgctatctatgaacgtcaattacaaaaattaagaatcaaagcgctcacgagtgaacgagtggcgattcaagagttattggaacaacataaaatttcatggcaacttgcagatgaattacgcaaaaacattaactattccgaaaatgcactgattttagcacgaacggatactgaatagattcaaaaaagccccacgcactcattttaaattgagtgcgtggggctttttttgatggttagaataagtggcggcggcggtagtatttgtagctgtaataaccaccaattgcaaagccggcgctgattagtgaaatcgtcaaaccccaatagaaataaggtggccagtatttaagggtaacggtatggtgaccttttttcagcgggatggcgatgaagttcttcaagccgcgtttgattttaaccggatggccgtcaaccgttgcatgccaaccagcagcataggggacggttgtcatgaggacttggttttgttgaggaatggtgatcgttcctttgatggttgtgtttgagaaagtattcagtttcaatgcatgtgcacgaagttgctgcgttaggtgcgtcaatgcttgataattcaaactatataaattaatattttggagccaaatttcctttttagagaagctaaggtcaacggtttgttgttggccgattgcgttacttgtcaggtttaagacgacagtatcgcggaaagtatcgtattgttgtagcgtgtgaccgtttaatgagacctgaaccgcatttttttcgaggtttgagcctaatgtgaggtaataggggtcactcgttgtgggtgtgaaggtatagatgacgtgagctggattcttcggatcaacccggaggaaagtttcgttgagttttggtttttgtttagcattcttgtaagtgacagtattgaaaaattgaagtgtgaagagtggctgttctgtcgctgaattgactaagtctgccgcaatctggttctgttcaaggatgggataattggcaaccacatgatgtttaagcactttttcagaggccgcaaagcctaaatcaagtgcgttggggttttgataaattgcaatttgatctttttttttgagtaagttataacgtgctaagtccggcttattcgtactgagtggaattgttgcttgcccactagtattgttaaggtagtagcgataacctaataacgcatcggtgaacagggtctgattagtatcggcaacggcgccatcgccagctggttcgccaatgctgcccatgaatttcggatagctcagttcgagcatcgaattaaaatgagatccgccgaaataatcagcttgcatcgggtcattttttgtccgcataaaggttttgccaattcgttgaaacgcggttttatttggaattgcgctaatggctgattgtaaatgagctgtataatctgcgtaatctttttgtgagacatagctaatttgattaagactcattgtcgcgttggtgaccatctcaccaccgacgcatagaactaagagcaaaggataatagcgcttgagcggctttttcaggagtaaaagcaagcatgtcatcagtaagaaagcgatgcttaagttaatctgattaggacttagcgcggtgaagctcttgagatgtttggcagtataaccaaaagccgccatcaacattaaaaacggcaacaagagttgataccaactaaatcgggggtgctggtggagccgttgaaccgcgagcacgattagccaaaagctaaccacatatgaaaagcggtaaggataccaaaccggaaattgcatgccgtgccataataaatcaaggggttcataacacattgaaacacctaagaaaatggtgactaataaggcaactaaccgttcttgccaggcaatcttgcgtgttccaaaatacaagatggcacaaatcaatacgagactgccgacgaatatattcggttcgccttttggcatttggtcgaagttaaaattgccaatcacaagtttagaaagcatcttaagcggattatattcgaacttccaatgaattttttgaatggtgtactgccctttgctctgcgtcaattggaaaaaagttggcaataggagccaggctgagagtaaaccggccaagagtgagccactgatgaagcgggcagcgctttgccatagatggcgccaagtttgccaataatgagcacaagcccacgcaaaataagcaatgacaaacaggcaaaccatatagcccatataatagttactcattaagagtgcggcaagactcaatggataaagccaaaagtgacggcctgtaaagagccggtcgatgcctaagacaactagtggaagccagacgagtgcatccaaccacataacgttaaactggttggcaattgcaaacccggataaggcgtagacaacactaagtgtcggtaaccaccagctatggagtagtttgttagattttaagtagtacgcaaagctaagaccactggcgcctgttttgaaaaggacaagcagccaaacaccaaaactcaaccaagttcctggtgtcaataggacgattagattgaatggactcatcaaatagtaagcccagaccccaagcatgtcgccccctaagcccttagcaaaggaataaaaaaaagtttcgggatggtgcaatagcgtacttctgaaaaaagcgtaaaaatcgatgtattgttggcctagatcaacagtcaggattgtttgccctccaaaagggaacacttgtcgaagtagtccgtagataaataaaatgccaaatggtagtaagaaactaaggcctaatgtataatgacgacgtgcaaaagcgtaaaatcgactcacggtaatcctccaattaataaaaaaatctaaaaattaggttgctagtccgtttttaactgagaaaagctgtaaaatataaccagttaatgactatgcttaagcataccataatctcgtttgaatttagagatttggcatagcttgtttaagataattttgctaaacttaaacaatacagcacaaaatcgctcaaaaggtcgcttggcgactttttgaagcatagagcggcgccatcttttactagagcggcgctaaataaggagtatctgaccgtctgtgaaaatcattaagagaaaaaacaaacaaaatcgtgaaaaatcactgattccattccgcttaaatttcctattattcgttgtcttcgcgttatttgccgcgttgattatgcaattgggacgcctgcaagtgatggagggcgctaattttcaagcgatggtcaacagtactgataagaaaatcgttacaggtaacgtgcctcgagggatgattctggattcaaagggccgtgtcttagttgggaatactgctaaaccggcgattacttatacgaagaatatgaatgtcttggcagacaaaatgtatgcagaggccaataagttaacccaatatttaacggtcccgacggataagttaactgaacgtgatcagattgattactacctcagtaaccccaagaatcttaaaaaatggaacgcaaaactgcctaaatctgcgaaggttgccagtgatggttctgagttgccagaaaagaaggtttatcaatcaacaatcgaattggttaaaaagtcgtttaaagggttaaacgagcaacaaaaacaagccgctgcgattttcaaaattatgagtggggcttatcaattatcgacagtttatattaaaaatacggatgtgactgataaggaaattgctgaaatcagtgaacatctaacgagtttgccagggattaatgtcagcaccgattgggaacgggcttatcctaatggcgattcaatgcgcagtattattgggcatgtttcaactgaagagcaagggttaccagaagatggcgtcaactccttgctagcacagggctattcgcgtaatgatcgcgttgggaccagttatttagaaaagcaatacgaaagtgtcttgcatggttctaagtcgcaatcacaagttgaagttggtgcgaataatcagattctctcaagtaatgtcttatttaaagggcaaaaagggagtaatttaaatttaacaattgaccaagcttatcaaacgcaagtggaagcggctttgaagaaagtctatgatcaggcaaaagcagcgggagccactcagtattctgatggtgcctatgccgtggcgatgaatccgaaaacaggtgctattttagcaatggctggcgaatccaacgatcgtaagtcaggtgaaattgccgatgatgcgctcggggtgattaatcacaccttcgtcatggggtctgctattaaaggggcgaccgttatggggggcttaatggatggtgtgattacgccaaccaataataccttaccggatacaccaatctatttaagaggaacgccggttaagaaatctgtttacccagttgggacgtttggatcattgaacgctgaatcagcgttggaagtttcttctaatatttacatgatgcaattagcgatgttagaagggcatgccaaatatgtacccaattcttcgttaacgatggattcagatatctttacgaagatgcgtggctacttcagtcaatttggcttaggacaaaagactgggattgatttgccaggtgaagccaccgggatcgaagggccaaccgtcaatgaatatggcgagccagccaatggttcattacttgatttatcttatggtaactacgatgcctacaccttaattcaattggcacaatacatttcaaccatcgcaaacggtggtcaacgaatgaaaccataccttgtggattcgattcaacaaactggtaacgatgggtcagctggccaagttggtaccaagaccacgccgacagtgcttagcacagttgatgcgcccgaaagttactttaatgtcgttaaaaaagggatgtacaacgttgtcaatgggaccaacgcttgggggacagcacacaccttgaaagatattaaaccaacgcttggcgctaaaaccgggacggcacaatcatttgcccgtgaagatccaaacgattcgacaagtaagcaagtcgaaaccgttacttctagtttggttggctttgctccatacgataatccgcaagtggcaatcgccattgtgttcccgaacttaaactctgataaagggcactacaatacgttactagcccgtgaaatgattacgagtttctataaattaaataacattactgaatgaaatattccaaaataaccttttcagataccataaaaaatggtatgatactaagagtctaagaattaaacagttttttagaaatttacttacagcttggaggctatatcaatgcgtgttcacattacaatggaatgtacagaatgtcacgaacgtagttacttatcaaacaaaaataaacgtaacaatccagatcgcttggaattaaagaaatattgcccacgcgaacgcaaagtaactttacaccgcgaaactaaataatagtgacgcacatcaaaagtcggggcgcttcgcgctcgggcttttttttgttaaggaggcttttgaatgcggactaaaaagcaaattcggcaacaacaaattgcggcattacaaacgcttgcgcagacgcctgcgcttaaacatgctcaagaagcacaacttttggaattgttaatggcaaccgaggtgtttcaaaaggcaacaatcatcggtgtcacgttgagtcagccaattgaaatggcgacccagccggtaattgatgccattcgtttggccggtaaagaagttgtagtgcccaagacattgccagagcgacaaatggctttttacccgttaacggcaaccactgaattaacaacgagttcctatggtgctttagaaccagtggttacagctggtagccaggtgttaatccctgatttaatgattgtgccgggactagcatttagtccagaaggttggcgggttggttttggtggcggttattatgatcgttatcttgccaaatatccaatgccaactgttgcactagcgcttaaaccacaacaacgaagtgctgattgggccattgatgaattcgatatccaactcgatcaggttcttcaggtctaaaggagaaaagatgactaattttaaagaacgttggcaagacgcaccgattgtggtgtatgccttgatgttactaacgattttgatgtttgcaatgatgtttttgaatccggttgtatggttgaacggctttacatcggttaacatgctaatgaatggccggattattgggtttatgatggcatctgtcaatcatggccggtttatgaatctcttcgtagatttggttattttgttttttgttggtggacaacttgaacgattattaggacactggcgcctattagctatctatatactgagcagtttggcgagtttgtttacaacgggcgctttttttggtctcgatacaccaaccgtgactgctggaacagctatcttagggctattcggtggcttcttgatgttaggtgatgcctttaaagaagaatccgtgctaggacaagtggcacgccagtattggctgtttttatttttaacaatcggattacaatttattgtcgatcacaatgcattgtacgcaatggtaggtggggtacttggcggctttttaagtagtatggcgctgggtgcacctaaagtgggtaagattaacccgctgaaccgtgtggtgagtgggttaatttatggtgcaacgatgattttatttggttttctgggtatgaatcattaatcaatttatgtataatgttaaaggtgaagttgatgagaactctatatgatgtacaacaacttttaaaacaatttggcgtttacgtccatcttggtaaacgactttgggatatcgagctcaccagtatcgaattacggcacgtttatgatgcggggttaatcgatggcaaagtgtatcgtgatgctaagatggttttagtgcgtgaacatcggttggagaaaaatgaagcgtttaatcacaatttattggaggagaagtttaaatgacagacaagaagttaatcggcgttgatttaggcgggacaactgctaaatttgcaattatgacaatggatggcgaaatccaacaacgctggagtatcgatacggatattttagatgaaggtagccacattacaccggatatcattgaatcgattaatcatcatttagatttatataacatgacacctgctgatttcatcgggattggtatgggcacacctggtagtgttaacagtaaagaagggaccgttattggtgcttacaacttaaactggaagacaacccaatacttacgtcgcgatatcgaagctggcacacacatgaagcttgcaattgataatgatgccaacgttgctgctttaggtgaacgttggaagggtgctggtgaaaaccaacccgatgttgcttttgtcacacttggcactggagttggcggcgggatcgttgctgatggccatttattacacggtgttgctggttctgcaggtgaattaggccacgtaacagttgaaccacatggttatgaatgtacgtgtggcaaacaaggttgtttagaaacttatgcttcagcaaccggtgttgtgcgcgttgcacgtgacatggctgaagaatacgctggtaattcaaaattaaagacaatgttggatgatggtgaagaaatcagctctaaattagtttttgacatggctaaagaatcagatgcattggctgttaaggttgttgatcgtgtttcttactaccttggtttagcattagctaacgttgggaacatgttgaatcccgcttacatcgttatcggtggtggtgtttcagctgctggggaatttttacgtaaacaagttgaagcttactttgaagaatttacattcccaaatgttaaaaatacgactaagattcgtttagcaaacttaggaaacgtagccggtgttatcggggctgcttcacttgcacttcaatttgatcaacaataatttgttataagggagtcttatcgatgcttgtattagggacaattaatgtatgggtagtaattaatattattctgatcgccattttactttggttcttgggcgattgggcatattatcaaattcaacgcaaacgcttaggcggcgaattaacggaagcggcgtttgaagaaacaatgcgcaaggcccaaattgtcgacttacgggataaaaaagattttgatgcaggccacattttaggcgcccgcaacttaccttatccaatgttgaaacaaaatatgggtgaactacggatggacttaccagtctacttatatgatgcaggcattacgctcagtatccgagcagcactgaagttaagaaaagctggtttcaccgacattaaatggttgaaaaagggttatgctggttggaccggcaaaacaaagcgtaaaaagaaattaaattaaaccaaaaaagcccaagagttactagcgaaaaaaactagtcaactgttgggctttttatagagtgcgcaagcagatggtcatactctgaggattagtggcataccgtaaatgagcggcagagccgatcgtttgcggtatgtaactaaccgaaagagtatatctggcggcgcacgtttcaaaacagagtgcgtttaaagcggtttgactctgagcattagcatagtgttgttaatgaccgacaaagtcggtcgtttgcaatacgaagctaatcccaagagtcagctttaaaaagcacgtttccacaaaaaaagtccgtcgccaatcaggcaacggacgcagtcttttcaaagcgcttagccttggtgagctgaatggctcttacggttagcacgtcgacgactttcttcaatttgattttctttttcttcgattggatcaacgacggtcttcttaaatgccaagagtgaaccggcaatcgcgccgactgttgaaacggttccgattacgaaaccttttagaaatttatgtttcataggtaaagcctcctcaagtctcaattcattcaagtacaactttattatcgcgtatttaagcgcgaatagctagtaaaatacgttaattaatgtggtgaaaatatggaaaaagaaaagctaatcgtcattgttggtccgacaggcgttggtaaaacagcgttaagtctacaactcgcacaacagttgcaaggtgagattatttccggggatgcgatgcaggtttatcgccagttagacatcggtacggccaaagtcacaccaaaagagcaggcgcttgcgccgcaccacttaattgatgtggcggatatcgatcaacgcttcactgcctttgactttcaacagcaaggacaacaactcgtcactgaaatcgtcggccggcaacacatgcccttggttgttggtggaacgggactttatttgcaggcgttactgtacgatatgaccctgggtagtgcgcaagatgcggaacagaattttacgattcgtcaaaaatggcaaacttttttggatcagcattctgaagaagctttgtggcagatgcttaatcaaattgatccgcaagcagccgctaaaattccgagtgcgaatccacggcgtgtggttcgcgcattagaggtttatgaaacaacgggaactttgttttcacaacaaaagccaaaagaattacgttatgatacgtttattattggattgaattgtgaccgtgcattattatacgagcgaatcaaccagcgggtggatcaaatgatcgatgctggacttttagaagaagcgcggttggcttatgcacatcgtgaaacgagtccgcaagccgtgcgggggattgggtataaagagttcttcccatactttgatagtgactgttcattagacgtggcaattgctcaagtaaaacaaaattcacggcactacgcaaaacgacaactaacgtggtttagaaaccagattccggtcaattggtataatctggttgaacaacctgaagctgatttggctcggattcaaaccgatttacaacaatggttacagcaataatagaaatggagtggttaaaaaatggattggcaagcaaacttagcaccagaattacaagctaaaatcgcagcagttgatacgcaaatcgcaccgcttttacaagcactggatgaacaaatcatcaataatcaagcaaaggtgctcgaagcgtttcaagcagaaaatatttctgaatcgcatttaaacgggacaaccggttacggcaacgatgatcaaggacgcgataagttagaggccgtctatagtcacgttttcaaaactgaagatgcgcttgtgcggccgcaattggtttccggcacacacgcgattggaacggccttattggggatgttgcggcctggcgatgatcttttatatcttacgggcgaaccatatgatacgttgcaagaagtcatcgggatggccggtaacgggattggttcactaaaagaattccaaattggattcgattttgtgccattattagctgatggtgccgtggattttgaaacggcccggaccaaaattacagctaagacaaaagtggtcgctatccaacgttcacgtggctatgctgatcgcgatagtttcacggttgataaaatcaaggaaatgattgcctttgtcaaaaacattaaccctgaattgattgtctttgtcgataatgcttacggtgaattctctgaaacaacggaaccaacagaattcggggccgacgtaatggccggttctttaatcaaaaatgctggtggtgggattgcgcaaacgggtggttacatcgtcgggactgaaaaattaatcgaaatgattggttatcgcctgactgtgccaggtgttggtgccagtgaaggcgccacacaaggcaatctgcaattgatgtttgaaggtttcttcttagcaccaagtgtgactggtaatgcgattaaaggggctgtttttgaagcagcgcttttggaacaaatgggcttgagtgtctcacctaaatgggatgcccctagaacagacttgattcaaacggtgaacttcggtaatccggatgatatggttaagttcgctggttgtgttcaagcgcaatcaccaatcgattcatttgtgacccccattccaagtgattttgccggttacgaagatcaaatcgtaatggctgccgggacctttatccaaggtgccagcatcgaattttcagcagacggcccattgcgcgccccatatacactttacttacaaggtgggttaacttacgcgcacgttaaactcgcgattagtcgggcagtccaaacaaccttctttgaaaaataaatgccaagcggtcaatcaaattcgcgtttgattgaccgctttttttgtgcgttaagcatggtatgataagggtgcaacgaatcgtagcggtcggttttaagagatgctttggattgttgctagtataaatgtgtcattctcgctacggtaagtcttggaggtggttagatgttaattggtcaacaattaaaacaatttcgtttggatgcgggctactctcaacagacactcgcagagcagattaatgtgtcacgacaagtcatttctaaatgggagacggataaaagtgcaccagacttgaatacattggttgttcttgccaaattgtataatgtaagtttgaatactttgctcggggttgaaacggtcactaaaccgaattcattctttgggcggttgcggcaacattggcatttggcagaaagcgaaaatacaaaaccgctgtccgatttaggacggattatgcaacaacccgaacaacactatgtggatttagcacaacagttcagtgtcactttgacggatgtaactgttactagtgatggccaaacaatgccagcgaattggcggcaagcacggagtccttatttaattgtattagaaccgcgccaaatttgtttaaagcagacagatgttttaaaagtcatgcccgcaaaagttgttaagcaacttgcgacaacggaaattcgaacaattcattatgcggtcatgcagactgctggaccatcaaccattggcgggttacaaggtatcgggcacgcttatcgggccatcgtgacggttgatacaaagcaatccgtagcaccatactatattaccaaccaggattttcttcagttggcaaaagttctgaaagcttatgcacaacaggaacatgttcaatttgatgatcagatggctttgctgccttattttatggcgcatgacacaactgactgttttaattatttggaggtacattacagcgaattagcggaaaaagttggggttccagcagaaagcgcaggacaggcggtttatcgatggtagatgaaacagcaaaaaacaactttgaaacggcgacagatggggttcaggcttatcacaattattttggcacgccaacgcacgatgatcgtatttggtttgaactcttaacagttggggtcttccaagtggggttgagctggaaagtagctgcaagtaaaataccagttctgcgacaacaaatggtggggatggtgattgatcaagtcgcacaatttgatgaaatggatgttgaacgcctgcaaaaagaaccagatatgattcgtaatacgcgtaagattcgggcaacgattcaaaatgcgcgggcaattcaagccatccaaactgaatatggcagtttttcagcgtatttgtgggcgtttgttgatggtcagccgcaattgcttgattcacaaatggctggcgtgtccgataaatcagcgccgatcagtacgcaacttgcgaaagagttaaagaagcgccagtttaaatttgttggaccggtggtaacgcatttgtttatgcttgcaggtggtttgattcaaatcatcgatgaagactaatgtctaaaaggtaaaccaaattggtttacctttttttgttggctgatgttagaaaatctgacatcaaatgttgaccgtttgaaaggcgactggtaagataaaacgcaagtgaggtgaaatggatggctgaaaaacacttaaggcgcaacttagcagttttaccaattggtacggtaatgaaattgacgggacaaactgcgcgtcaaattcgttattatgaagcacaggcgcttgtttttcctgaacggacaacgggccatcaacggttgttttcgttgaacgatgttgatcgtttgttggaaatcaaggattacctagctgaaggcaccacgatggcacagattcgccagatttatcagaagaaggcggatcggcagcgtgataaacaattatcagacgaaaaagcgcggcggttattggccaatgaattattatcggtcggcggcttagttggacaacagtcaaccatttcacaatcatctaaattatattaaggggcgacggattaatggcacgtaaagtattgacagcagaagcaatcaagcaattagtggatcaagaaaacgttaagttcttacgtttaatgtttacggatatcaacgggattatcaagaatgtggaagtaccaattagtcaattagataaagttttaagtaacaaaatgatgtttgacggttcttcaatcgacggttttgtccggattgaagaaagtgatatgtatttgcggcctgatttaagtacatggctcattttcccatgggaagcggaacatggaaaagtcgcgcggttaatctgttctgtctataccgcagatggagaaccattcttaggcgatccacggaataatttgaagaaattagtgcgcgaaatgcaagataaagggttcaaagactttaacattggaccggaaccagaatttttcctctttaaattagatgaatacggcaaaccaacgttgaaactcaacgaccaaggcggctactttgattttgcccccgttgatttaggcgaaaactgtcggcgtgatattgttttggaacttgaaaagatgggctttgaagttgaagccagtcatcacgaagtcgcacccggacaacacgaaatcgattttaaatacgctgatgcagtcgatgcagcggataacatccaaacctttaaattagtcgttaaaacaatcgctcggaaacatggattacatgcaaccttcatgccaaaaccattacacggtgtcaacggctctgggatgcacattaatatgtcactctttaatcaagatggtacgaatgccttctacgatgaaaaaggtacagaacaactttcaaaaacggcttatcatttcttagctggcttattgcaacacgcacgcgccatcacggcaatcaataacccaacagttaactcttacaaacgattagtccctggttttgaggcaccggtttatgttgcatggtctggtcataaccggtcaccattgattcgggtcccacaatcacgcgggttatcaacgcgtctcgaactacggagtgttgatccaagtgccaatccttatttagcaatcgggtcgattttggcagccggtttatctggcttagatcaagggctcttgcctgatgctggtgtggatcgcaacatctacagcatggacgaaacagaacggaaggaaaatcacatcactgacctaccatccacattgcacaatgcattgaaggaactaaccaaggatgagattatcaaagattcaatggggtcttatctctatcagagcttcatggattctaaatcattggaatgggcagcttatcgtcaacaagtttccgaatgggaacgcgaacaatatttggaactctattagtcgcaatttacgccatgtttttgtacaattaaactttagaaatagaaagttggcagaatatgaaaacattggtgattatcagccatcccgaaattgagacgtcgatggtccaaaacttcttaaaagcgagtgcagcaccactggaagccatcacttggcaccacttagatgcgcttgagacgttagatgtggctgctgaacaagcattattacgcaaccatgagcggattatttttcaatttccgctctattggtatactgctccagcgagcttaaaaatgtggttggacaccgttttaacagggcaatttgcctttaatggccgccaaccattagccgggaaaacactcggggttgtcgtttcaactggtacggcggctaaacattttcaagctggcggcagtgaacaagcaacgctgtctgaaattttgcgcccatatgaattggtggctcgtaagctagggatgacctatttaccaccacttgcgattcatcaattgggttattggcaagaaactgataaacaatgcttggtcatcgattatcaacggtatttgacgcaatccgagttcaattttgatcagcaattagcgtggtttgaagcgatgctgactaaaaaggctgctgaagccacatcgcctgaagcgcaacaacgtttaatgcttttaagcgaacaattcgccgacaaacgatcggaattaaccgatttgaattggcaagtccaactgattcgcgaagaagagggggaaggctaatggattggttaacagaacaaattcaactacaaaaagaacaagccacaacgtatgaagagcaagctttttatacggcgcttcaacaaacgagtgatgaactagcattacggattgaacaacgccaaggtgaacttgatggtcgaatctggaatgcaacgaattggtaaactaatacaaaataaaaaacgccgcgacgaaagtcggggcgttttttgtgtaattcgattaatagcgtttgattaatgtatcgaaagcatcaacgattgcttggaagaaaccaagtgtatctgggtttgtgatttcttgattgtcatctaataagttcatgacattgccgatataagcttctggttgttgaaccgttggcatgttcaagaaaacaagtgattgacgtaagtggtggttagcaccgaaaccactgattgcaccaggtgaaacgctgacgatttcagctggtttgttatcccagatgcttgcaccataaggacgtgaaccaacgtctaaagcatttttcaatacggctggtactgaacggttgtattctggtgtgacgaataaaacggcgtccattgtcttcattttatttctgaaagttgtgtaagcttctggtacttgatctaaatcatcataatcttggttgtacaatggtaagtcaccaatttcaacaatttatagattataatctgatgggaataatggcatcaatgatttagcaactgatttgctaaatgaatctttccgtaaactaccaattaaaactgcgatattttttgtcatagtgaaacctccaattgttttacttattattagtaagtaactttagtatagcacgttcccctgaaaaggcaaccacttttacttactaatttaagcatagcgaattggtgaagcttttagcaaacaatatggtcggccattgattggcattggcaagctataaatcgtataatagcagtaagtagaacaaagatgggaaatgaataatggaaattaaatggcacgtcaatcaaccacaatctgttaaacaattcttgctagcaagtggcatcagtcaacgattgtacgccaaaattaaggcgttaggccaaccgattctagtaaacgggcaaaaaagtgcgcctagtgatcaggtacaatgcggcgatgtggtcacattgcagttaccagctgaaccggccgatgaatcagttgctgttagtcacgaaccaatcactatttgttatgagaacgagtattggttggcggtcaataaaccagctggcttggcaacgattccgggtcccactaatcaaacggatactttgttgaatcgcattaagggttactggcaagcgcagggtgcaacagatttagtaccgcatatcattacgcgcttggattttgatacaagtggaattgttttagtcggcaaacaccaaattgcacaaagtctattgcaaccgcagattgaacagcatcaattacaaaaattctatttagcagttgtttcaggaacgggtttaccagcatcaggggatattcgtgaaccgattggacaaatcgaccatcaaccgcggcgtgcggtgttggcggatggtcagtcagcttggacgagttattggcgcttgggtgcatcgggtcagttgacggcggttaaagttcagattcatactgggcggacgcatcagattcgggttcacttcagcgcgttaggctatccattggtgggtgatcagctctatgatgggccgcttgatttagggataacgcgacaagcattgcacgcgtatcgactgcaatttcaagatccattcagtcaacaatcaatctcgattacagcaccgattgcagctgatatccaagcgattctacctacagaacgattaccaattgattgattcaaaggaagatgacaaatgaaaaaatggcaatggttactaatttgtatcttgtgtttcggcattggtggggttatcggtcatgtagcgactggtccaacaacggtgccatcgattattcagccaacttcggccaccgcaaaccagcccgttattttcgtaccggggagtaatggaacagttgaagggtttaatggcacctttgctaaattgaaccgtcaagccacacgccatgttttaaaagtaacggtattaaaaaatggtcacttgaaaaccagtggtcgctttgatcaaaaaacacaacaccccgtgattgtggttgcgtttgaaaacaatgcagatggtgatgagaacgtctttaaacaatccgaatggtttaaattggcagcaggtaaattagctaaacaataccactttacgcattttggtggggttggttattccaacggtgggcttgtattaacgcggtatgctgagcgtagtggaagtggaccgaagattacgcgattactgacgttgggaacgccatataatggcatgtcggagcacatcactcaggaaacaccgatgttagctgatttaaagagccgccggcaacatttatccaaagacttagtggtctattcagtcggcggcacaattaacgataagaatgatgggattgtcccagcagcgagtgttgcggctggtcggctcatttttcaaaagcaagttgctgattatatgacaatttcggtgagccagcaccatgcagcccatactgaattgccggataatccaaccgtcatttcactgattcaacaattgatgtttaaataaaaaaaggtgtgtcgcagcaagttgagctgtgacacacctttttaataccattgatcgattattttcaagagattccgcgtgatgagcattcccatgatgaagattaaaatttctgttaatgggacactcacccaaacaccggttaatccgaagaggctagaaagaaccaagacgctcgcaatcaaaacgatgtagccccgcatgatggccacgaaaaatgacaatcgaggctgcgcaatggcggtcatgaataagttattgacgatgttcatgcttgagaagaaaaaactaatgaaaattaagggaatgccagcagacgcgtagcgaatcagttgttggttgtgttcatggttaaaaatttcgatgatcggtaatttaagaccaatcaaaacgagatacaatcctaccgcaatcccgagtgcggaaagcaaaccgattttgagactcgttttgacattatcccaatgatgtttcccaaattcgcgactaacgattggctgaaccccgactgcaacaccgttgaatagggatagaccaactagtaagatgttggcgataatgccgtaagcggcgacggcatagttattactgagatggagaataacgatgttaaagacgaaaatgctgaccccagtactcatttcagttaagaaagatgggaaaccgagttgaattgctttgaacgtcggtttaaaacgtaaggttaagtgctgcaaagttagtaaccgttgtgggtgatgccggtgttgtgtcaaaatcagtaggctgacgattggcgaacaaatcgtggccatcgcagcacccatcatgcccatgtgtagggggaacattaagaggtaatcgaagataatgacgaataagctttgtgaaagcgtcgcaatcattgtcaaatgtggattactatcgttacgcacgaaacttaagactaagttattgatgataaataagggactgcctattaaaataattcgtaaataggtcaagcttggggcgagcgtttcatgattggcacccagtaagtggagtagtgggtgaataaaaattaagccaaatgccatgatgatgaggcctaataaaatcccaaaagaaagaacttgagtgaaaatcgagcgactcttttcgggatgcttgctcttgttaattgagaaaatcgtggcgcccccaatcccgagcatcaggcctaaaccgttaaataagttaaaaatgggtagatcaatattcaaagcggccaagccaattggtccgactgcataagcgataaaatatgtgtccgctaaaatatagatggataagcctaacgagctgaaaacgtcgcggatgatgtaacccgttaattcttttttgatatgtggtgagttttccaaaataacactcctattcgattggtagtggggtcgctattaataacgcaataaatgattggattggtgctggtaaattcttccgggcgacaaggtagaattggcgttgatattgttgagacaatggtcgatagggaatttctgggtaatcaagtaaggttgcgctagaaactaatgattggccgataccctgtcttaatagttggataatcatcgcattgcttttgatggtcatcacgttttcgagtggtaaattattttctttgacgtaattcatcgtgtagtgatagacgccagaaccctgttcacgaagtaaccaaggttcattcgggcgacctgctaggactagttgatcggtctgtagtggcgtccgaatcaagtctttttcggttaatggtttttcaatgaaaccaaagtctagtttgtgctgcgtcaattcttgaacaatctgcgatgagttgagtgtactgatatctaaggcgagtgtttcaagggctggccgatgcgctttaagcagggttggcaataagtaggttgcagtggtgtgcgaggcgccaattcggcacggtgtttttggctggccatcttgatgatggagtgcgtgcaaatcttggtcccataaatcaagaagttgttgtgcttgttggtagaagagatcagcactcttagtcggcgtcatctgctggcgcccattgcgttcaaatagtgtgacccccagcgcatcttccaattgtttaatttgcacagaaacggtcggctgcgatagaaaaagcagttgcgcagccgttgtaaaattcttggtttcataaacggttttaaaagttgttaaaattttaaacatatcatcacttctattcgttatcttaataacaactattataaagatttattttattaattgaaagagtttcggtatagtttaagataacaagtgagaaggagtaaagcaatggacaatataacaaaaaaaatacctggctttgcgttatcgttagcgattgcgattgccagttattacatcgctaaattatggttaccaatgttaggcggcgcaacgattgcgctttttgtcggcatcgtacttggcaatacttggttgcaacaaccggtattagcagccggaactaagttttccgagaaaaaattattggaatattcagtcatgttactgggtgcgacaattacattccaaagtattcaacaaatcggctggcatggtgtgctgtttaccgtgttacaaatgagttgtacgattggatttgccatctggtttggccgccggttgcaatttagcgaaggtacctatttattgatggccggtgggaatgccgtttgtggctcgagtgcgattggggcaattgcgcccgtcatcgatgccgataacgaagataccggcattgcgattacattggtaaatctaatggggaccatcttgatgttactcttgccagttattggaacgttgatgtggggacataataatgaactccgtggcgtgttaattggtggaacagtgcagtcagttggtcaagtggttgccagtgcgacgatgattaaccaaggaacggttgtcacagcgaccttattcaaaattttacggatcatctgtttggtttttgttgtcagcggttttggttacttacatcaaaagaaacaaagtaaagtcagtgatacaaaactgagcgaacaattattagcgaagaagagtagcttagtgccatggtacgtgattggcttcctattattctgcgtcttaaatagcttacgggtttttccaagccaatttggtacactgtgccatttcttgagtacatggtgtgaaacaacggcgttagcagccattgggttacgcttgaacttaaaggcactcttcagccaaggtaaacgtttattagcatatgccggcggattagtgaccgtacaggtagtcctcgcgattttattaattacactattattctagggcgtgtcagcagctaggatgtttctaggaatattgaattattaaaaaatctgccatcaacaattttgttgatggcagatttttttgttattaagcttggtaagtgccgacttgaacggcttgttttaaagtggctggtgtgtgatgtgacttggcgaaaaattcgcttaaatcacgtccggctgttaaacctttaaaatgtttgccgccttgccaaggggcgattgcggaaaggtcataaacgacgccatcaacggcaacgtatgcgggttgaccatcttgaccgttatattgagcgagtgtttcttttgtaaagactttatctgtcatgattaaaaatctccttcgaattgtgaatgggttaccaataatatagcgctagatgcagaagttggcaacgattaagttgtgcactttgaaaatgaataatgttgaggctagcgaattagagaattattcgtaaccttaaatactgttcttcaaataataatttgttaaaataatcataattgggggggatgaaaatggacaataaaaaaagactggttgatgcgacaagttgattcttttgcggaaggaatgggttatttgttatcgaaacaaagtggtaattcacagtcggaggttgtctttccacaagaaaatgctaaaaaattgccttttcaaagggaattggcaagtttaattgctgccaacgatactagaggggccgcccaacgattattaaaattacaatacgcaatgcctgaagaacaatttctacagttaggtacatggttattattagaaatgaagcaggacagttttcctaatcctttaacccgtgaagcgctgacagacgttttaaatacgattaattaaataattgaacgaaaaaaccaccctaataaataatagggtggttttatttaatattgatggacccgaccagattcgaactggcgacctcctacatgcgaagcaggcgctctcccaactgagctacgggcccaaacgcttacaaaaatattttagcacttttagctaaaatagcaaggcgaattagtgacgggcagatgttctgaggttatttgcttttttgccacctttaatcgtgcgggttttgaagtgggcttgttggctatcaggaacgaacttgaagtgttgcattttcccggcatatggttggccactgaggcgaatcttcaaccaattttgcatggcttcaatcattccagtcagtttttcggcttgttcagaatttgcttgtttttggacttcggttgtaacatcgttagtgagataagccaataatttttgatgataggcaattagttcttctgtgagtggcgcttggttatattgattgaaaagtttttgaacaaaacgcattgcatctttagcgttttgtggttggtaaaagcgatcttgatcagacatagaatttccctctttcttcagagtagtataacgaataatagtgctcgtcacaaccgtgtgctttggtataatagagaaatactagtttttcggaggtcagcaatgtttaaacgtaaaagtgattggttcttagtggctgcactggtgatgatggcgatcttattttacagttcttcaatgacgtatcatgaacaaacatcggtgcctacgttggaacgatttctcaagaatgaaccacttaaggcttggttaagtcaattttcgttccattatgcaggcagtgaacagagtgtaaaagcatctgggtatttcaaatttgtggagtttttcgtgcgaaaaggcgcccattttgggacgtatttcttattggcggcttttagttatttagggctacggccacgcgtaaccggtggttttttagcagttatctttagttggctggcagcaaccgggtatgcggccacggacgaatttcaccaaatgttgactggtgatcggacgccactttttcaagatgtgatgttggacagtgttggcgcattaacggggattgtgattgtttgcgcactacagtggatttttacacaaaaaaagagacgatagcccgactatcattgcttttagcatggtaatttgctatcatagaaaacgacttagtaccagaattctataatcgaaaagaggagttagatatgtcaggacattcaaaatggcataatattcagggtcgtaaaaacgcacaagatgcaaaacgcggcaagattttccaaaaactatcccgtgagcttttcatggctgcgagaagtggcggtcctgacccaagttctaacgccgcattacgtttaattatggataaagcacgttcagctaacatgcctaaagataatatcaaacgggcaattgataaagctgacggtagcgatggcgcgaactacgatgaaattacttatgaaggctatgcaccaggtggtgttgccgttttagtacacgctttaactgacaataagaaccggacaagttcagacgttcgtgttgcatttactcgtaatggcgggacaatgggtgcttctggctcagttgcttacatgtttgatcgtcgtggttacattgcgattgcacgtgaaggcttagatgttgatgaagatcaaatgtttgaagacattctagaagctggcgcggatgatttacaaactgaagaagacgtgtttgaaatttacacagatcctaaggaattagcaaatgtccgtgatattcttgaaaagaaatacacattggcaaatgctgaattaacaatgattccacaaaatacaacaccggttgatcctgaaaaagcagaacaattccaacgtttaattgatgctttggaagacaacgatgatgttcaagaagtttatacagctggcgaactaccagaagaagactaatttgtttgataagtgcgttgcaagtaattgcaacgcactttttttgtgcagaaaattatccggttatttgcgtatctttggttagtcaggaaggagggacgagatgactgaagtattaacaacccttttgcaaaagtgcgcaacggaaaaagcgcaggatctttattttcgaccactatcgacgggttgggcaattattgaacgcttagcgacaggactaaagccgttacaaaaagttactctgtcagaaggcaatcaatggctcaatcaaatgaagtatcaaggggggatggatatcagtgaaactcggcgtccacagaccggccgttcagcgatcgaggtggcaggcgaattgatttatttacggttggcaaccgtgggggattttttgaatcgggaaagtttagttgttcgtttcatttatcccattgggcagacttatcattgcgacgactcgcagattttaagtcgtttaatgcagttaattcagcaaccaggattattgctatttgccggtccaactggttcagggaagacaacaagtttgtactatcttgcggaacaagtcatgcaagataagatggtggttgcgattgaagatccgatagagattcaacagccagctttcttacagttacaggtgaatgaagccgcagggttaacctatgcaacattgttgaaaatcagtttgcgattacggcctgataccttaattattggtgagattcgcgacttacagacggcccaacacgcggtttctgcggcgttgagcggtcacttggtactaagtacgattcacgcgcgaagtacaacgggggtgatggaccgtctattagatcttggaattagccactcacaattaaccgcttgtttagcgggtgttgcctatcaatcactagtggtcgacggccacaatgtagcggcccactatgagttagcaactgcacaacaattggaggaggctgttcatgaagactaaaaccactgttcaattcaatactgaatttatgttgctgttagggcgcttactgcaaaatggtttttctttacaacaagcacttgagttcatgccgattgtttttccgacacaaaagcagtggctgcatcaggtgcaaactgggttagaagcaggaaaacgactagcaccaagcttagcggcggtttcgtttccaacacaccttgttgcacagattgaattgactgagttgcaggggaacttaggcgagtgtttgttacatcttggccaattacagcgaattcaacagaaacggcgtagagagttagttggcgtaattgcctatccctgttttctactcctttttctcggggcgttgattgggatgatgcagatttatctttttccggaaatcgcgcagtttaacccaacaacttcggcgacatcaccattacaactattttttagagtgatggggacattcgttattatggctggtggtctgattagtgtgtatttattccgttggcatcggcgaccgctattacaacgattggcggcggcatttagatggcccttcatcggtaaaacgttgcaggcttactatcagtattgcttattatttgatttagcgacttgcctgaataacggcttaaacttggccgaaatgcatcagcttacacatcgtttggcgaaaacatcgtggcttgtacaattaatgcaacaacttgaaacggctgtccaaaaggggggcacgctattagcgaacttagcggatggcgttttttatccacctgagctgcaattagtgctcgctaagggaagtccgttacaacagatggccaaggaggttgatctgcttgcagtcattaaatacgatgaactgcaacggcaattgaaacagaaggtgaattggctacaaccgctcttgtttatcctaattgggatcatcattatttgtacctatctcagtattttattaccgctatatcatacaatggagggaatttcatgaagaagaaaagaaatgcatttacattgatcgaaatggtcgttgtgctagctgtgatagcaatgttagtcttgttaattgcacctaatttaatgcatcagaaagagacagctgagcaaaaaacggatacggctctagtggcaacgattcaaacacaagttgaattagctgaggatgacggtaaaacggtgtcgagtctagccgatttagcatcaggtgaaaaatatttaaccaataatcaggttaaacaagctgaaaaacgcggcataacaattaaggataataaagttgttcaaaatacaaaataaggcgttcactttaatcgagagctgtcttgttttgttcattgttggagtagtcagtttatttgcgttgcaacatattcgagattatcgtgcacggcaggcggagcgtttattttttgaacaatttgaagcgtcttggcatgcgactcgcgaatatgtcgctgttgagccgcataatgtgcacttatcttgggatcaaaccaaccacacgttgcattacacaagtgcggatccacaataccaaagtatggatatcccgattccagaaacattgatgtgcgtcgatccagaaacatggtttaggatccaatttaatcatgactcagctgctagaccgcggtcattgatttgtcggtctaaaattgatgggcaccgttatgaatatcgggtccagatgatgtgggggatgttacatgttaagaagtagaccggcatttctattaatagaacaaatcgtggcgttaagtcttctcctgatgggaggcttgaccttgacaatgagtctacggcagtttaaagcacatcaagttcaacggcggtgtgctgctacagaatatgctgtaatggcaatggctgccaatcgattggcaaatgagcagccgccacgagcacaatggcagttgcaacgggaaacataccaagtcgtcaccaaaaaacaggccatttatgtcacaaataaagcgggtgagcaagttgcacttcaatggtattgttactaaacgctctggatttacactgattgaaatggttgtagctctcgttattctgatattgagcagtcaattaatattggcaaccactaaaacactaacgcacacaacgcaattaacccagatggaacgtcagaatattaattggcacattagtatgattgaacttgatcgttttctggatgacgctcaatttatttcaattgaacaggcgaattatgaacagcaattaaccgtcgctaaagattcgaaacgacgctataccttaacgaaaactaagaaggaactggtggtttcgagtacgaagaatggttatatgcctctgtttgatggggtctcgcggttaaaaatggtgtatcatgaaccttttttagaactcgaagcgcgcttaagcgatgggacagcctatcaacatgaatgttttttggaggcgcaatatgacacgaaaaatacagattaaacgctctgcagtcgcgctcttgaatgcagttttgatgttgagcttggtgacaagtgcgttgttgattgtgacccacagttaccaacagcaacaacagagttacgtcagtttgactaactattaccaaacgcaaatcttgcttaaattaacaaataaagcgcggcaaactcagtcaattcaaggtataaagactaacatcggtaagagtcgtatcgaccagcaacacaagttaatcatcattgagttaaacaatggttatcgaaaacagtttccagatcagaatgaaacagatcaaggataaattttctatttgataaagcgcttactatgatttataattctaggtatacccacctgtattacttgctttgccgttagaataccgatagaatataacaggaatctaatgaatagaggtggctattttgcctaagagtgctgtagaaacgttgtttgatcaactcgatcaaacaacacaattaattgaaaagaatttagaaacaacctatttggatgcactcaccgagaccattgctaatattgcagatggtggccgcgtaaaggttgaagacggcttaccagatgctgccactgttgcacaactagaaccgctttatgcggcggttaatctcaaccaatttgaagcagaagaaattcgccaagcattacagttggcaacgctcaagggtttgcgtcaagttaaagtggaaccaaacaagcaaatgacaccagatgcgatcggctatcttgtagcttatttggcagaggtttttggtggtgctgaccaaatcaagacaattttggacccagttgttggaacggggaacttattggcaaccgtaatcaatcatatccaaaaactaacggggaataccgtgcaaggttttggggttgataatgatgatagtttgttggaaattgcgggcatcagtagtgaattgcagaagcattcaacaacctttttccatcaggatgcgattgaaccgctactggttaaaccagttgatatcgccgttgcggatctaccaattggtttttatccattagatgaacgggcggctgattttgaaacccacgctgccagtggtcattcatatgcacatcacttgttgattgaacaaacgatgcattatgtgaaagaaggcggctatggctttttcctagtaccaaatgtgattttggaaacggatgaagctaagcaactgattaaatgggtgacaaaacatgtctatttgcaaggcttattgagtttaccagcaaacttgtttaagactaaggaaggtcaaaaagcaattttagtccttcaaaaacaaggtgccggggctaaacaagtggaccaaattttattaggtgaatttccaaattctaacgatcaaaaggcgtttgcaacgtatctacagaagatccggacttggcataaagataatttacaataatcgaatagaaaaggtgattagatgtcaaaagtattagcaattaacgctggtagttctacccttaaatggaagttatttatcatgcctgaagaacaagttgtcgcacaagggatggttgatcgtttaggattatccgattcagtctttaccgttaaatacggggatggtcaaaaattctcaatgacccaggatattaagacgcaagatgttgcggttgatttgttattgaagaagttaatcgaatttaaaatcatcaatgaatatagtgaaattagtgggattggtcatcgggtcgttgccggtggggaagactttaagtcatccgcattaattgatgaagcgtcattaaaacggattgaagaattgtcagaatacgcaccattacacaatcctgctgaagcaggtgttatccgtgctttccgcaagattttacatgatgtaccacaggttgctgtttttgatacatctttccatacaacgatgcctgaagaaaattatctttacagtttgccgttggaatattatcacaagtatggagcacgaaaatacggtgcccacgggactagtcatcggtatgtttcccaccgtgctgctgaaatgttaggcaaaccattggaagaattaaagatgattaccatgcatcttggtagtggtgtttcagtgactgctattaaagacggtaaatcgttggatacatccatgggctttacaccacttgcaggggtgacaatgagtacgcgttcaggggacattgacgcatcactcgttgcatttttaatggaaaaattaaacattaaagatccagcagaaatgatcgatattttgaatactaaatcaggtatttatgggatttctggattatctcctgatatgcgcgatcttgaaaaaacgcgtgaagaacgtccagaatcacaattggcaattgatatcttcgtcaatcgtttaatcaagtatgttggttcatacgttgccattatgggtggtcttgatgtcctagtgattacagccggaatgggtgaaggtgacatcttaatgcgccaacgcatcgccgatcgcttgagtttctttggcgttaaagttgatccagaacgcaataacgtgatggctcaagaacgcgtcatcagcgctgacgattctcgcgttaaagtattattagtaccaactaatgaagaagtaatgattgccagagacgttgttgaaattggccacgtctaaggcatcagtgaaaatgaccagcgcatggctggtcattttttagtggagggaatgggaatatgacaggttttacattattttatggcttattggcaattgccttgctcattatctggctgattgttgaaacgaaaatggtttggcgcgcaaaacggaatcgactatggacgatttttttatgttgtgctggaatcctcttactaggtttaacgttagtgatgggcagaacgctcagcgatcaaatcacaggtatcggctctgttgtaattttaattgtgattgctttttggcctcgtggtttaaccaaaacaagtttgattgcaaacttaaatactattcatcaatttgcagcgatttctaagattgaattactaacacaaggtgacttagtcgaagcttgtttttatgtcggtgaaattcggattgccaagttgcgctttaaaacgacggtagaaaaattacaaacctttttaaaagaccggtttcctaagaaacgcttagtggtgaaatagggttaaagtctttcatattactggctgatatgctaaactagtatttgcatatcggggccgttacggattcgacatgtgtaggtgagcgtgagttgcacttcgtaggttacgtctacgttaacaacgttacagttaattataactgcaaacaataacaattcttacgctgtagctgcctaaacaccagcatagcgtgatccgcctgacttcacccaagggttagatccgggtctcaaattaattgggttacgttaaacgctgccgtttgaggtgtttaaaagaggtttgcaaactagctagttcatccgagcttctgtcggacggcgttttggactagcgaactcctaaatcgttcgactatgagtgtagagattgacgtggcaatgcgcatggacgcgggttcaacccccgccggctccattagataacaaggtgttaagcagaattaggcgcttaacaaaaggcgattaacactaccgtaacggtgttaatcgccttttttgtttgcaaaaaaataacagccacacgtgtgactgttacattaattgcttatgcccaacggtttgtttttgttggtaagagcattaggatatagaaccaaattgtcccgataagcggtatgaattcaatgagtacccaccagcctgagcggtctgtatcgtgaagtcggcgcattttaacggataaagttgcaatccaaacaatgaagacgacgatgttacgacccattgagatgcctaaatccccaatattatagatttctgaaattggatggccggttattgtttgaataataccgatgataataccacctagaatgtagttaatgatgattggccaccagaaatcaggtcggtttgaagtgcctgagaaatcaaaaatccgggaccaaaaactttgatatgatttaaccatgatgtaaaacccccttctccttatcagcttttcgcatcgtcagttctggacgagatgagaagttatgataaatttaataacttcctaccaaagatattatgacatacttaaacgagttttttacagtttttagcttacatagagaatcaataatttattcgccaacgcccattaatgaagcaagaatgaataataaccaaatgtgaattgggtagaacaagtagaagaaatacttcatgctacgtcctttttgtccgttgtacaagaggattgggataatcgcgaagatcatcatccattgcgtattgctagtgaagagtccagtgaaggcaaatccggagttgattccagcgtcaaggaatgcgaaaacaagaacggtaagacattgtaagagccggttgtttcggaaaagataaaaaaatactcctatgtagaggagaaggccattttccgcaagcataatggttggaataaccattgcgagattggcagcaaacatcattgtcttagggttagcaattagaccaagcgccaataatgataagaggataggagcaataattgccagtccaccaagcaaaatttgtttggaatggtgcgtgcggcgaccgacactaatttcttgaatcccatacattgctaaaacggcaatgtataaatcggtaaaaatattgtttgacagtgcgaggttaccgacttcgaagaagtgttggacaatggggcttcccaagttcataatccaaaaaccaacgagtaattggaacatgtaacgtttttgattccgcgtatgtatgaatccttcaactgccataaagaataagatggtggcaactggtcgtccgaactaatcaacccagccagggaccccagccccggcgaacatttggtgcacgtgatcaataaacatgaggataattccaattaccttgacgtcgaagttatttaaaacttgatatgatttagtctgcataatagcctccctaaaagttaagtaagtacattatcgtatgtttagctcatattattaagttttaaatggctagtgacaataatgttagatagcaaaaaccacgataaaaggaatttatcgtggttctgagcttatttagcaatttggcttgtgccatctgcgtaatttaatgtaacgccgtcttggacgttaaaaatgtaagtgttaaattgaatgctgttatccccgacggattggccttccatttgaacgccgcgggctagcagctcattatcgttaaaaataggtgtgacacggtaacgaacaaaacgattagggtgttttttgagataataagcaatatctgattcatgggccagcatttcgggtgcgtttagctggcgtgttcctgtcatcagattctttggattattattttcaccggttagttgatagccaattaaatgactccgattatacagccagccagatttaatccgcttattatgccaaccggtcggattccaagtgagtccttcgcgcttggcagtaggcatcatcgattgatttaaaagaacatttgcagcaccaacgcgatttagtgcgtcgagattactaaaggtttgccaaccaccgtgatcggtagccaaatcagtagcactgaagcttggttggttattattgacgagtacctcgttttcaccacggtaggtgagggccgcgagctctgatgtgttatgacgctcaggactagtcgtttgcatttgttgctgatagttagtgagttttttgtttaactggttaattttacgttgaagcgcattaatttgacgttcggtttttttgttgtgcgcattaatgcgcttggtttcttgacgtaaggtggtagcgtgaacggtagttggttgttgcaaaagggttccgacaccagcaagtgaaattgttaccaccacgcgacttatcaaacgggttgctttcattggctaatcctcccatccgcaaagggtatagccttctgcttgtgcttgtgacaatggcatggttgtagtactgttggcacgacttaagccacggcaattgggatcaagatggtattttttaccagaattaggggcaattgtcaccatttgttcaacttgttgagcactagcagcttgttgtgcttgttggcttgcctgaattgcagcctgttgctgagcggcctcgctagcttgactagtagcggcgattgaggctgaagccgcacggactctttctgactcagacgctttttgctgctttttaacaagtcgtgattgactggcaacttgttttgtcagttggctagcctctgttttctttgtagctagttgtttttttaaagcgctcgagttagcacgggccgccttgttttcgcgtacatcaacttgatgttggctggtcttcttggaattcgcagcagccaccggcattaatgaaccgcctaagccgattaaggcgatgatgataatcagtacgcgacgccattttctgggtcgttgccggttaaagaatagtagtgaaatcagtgcgctccccaagaacgctaaaaataaataggacataataacctccaaagtaatgaataacagttcttaacgattgtatattgtacataatatgaaagcaattataaaaagcctaggcgtacctaggcttttagcggttaatctttggttgtgagtgaaacaattgcttttgtttgatagtatttttcaggattggtttcaaaagttaaccaatctgcatcagcgaatagaccagccaatgcaagaattgggcgttctttagcgagttgttgttcgctagaagttgcaatggcgtcttggtagctaccattgaagatttcatctagataaaaggcttgatcatcaccaacgtttaaataggtagtatcattcttccaagcatgtagcaaatccatttccgaaaaagtaacggtttcgttatttgaaaaagtcatgataaattgcatatgggtcaactccaatcaattaattaagcaacaatctatttggttgcctgcctaaattatagcatttagataataaaaggcgaaccttttgacagtcattgtggttaaaaagtagaatgaaggtgaacaaaatagaaaggaagtcattgatatggcaaacgaagaacgattagatagtttgaaaaatgtaattgaaggcacagttaagaaggttgtcagtgaagtgacacctaataaagataagaaagaaaaggcgcaaaaagctgacaaaaaataggacttagtaatgaagtaaaggtcaaaatcatccgtttggttttggcttttttattggaaagccgttaaatgcgttcgcttttacgaggcaggcttggtataatttaaaggatagtcagaggaagtaggtacaattaatggattacgcagaaatgttagaccggcaaaagcacattcgtaatttttcgatcatcgcgcatattgatcatggtaaatcaacattagctgatcggattctcgagatgacggatactattgccaagcgcgatatgcaagcgcaagtcttagatgacatggaattagaacgtgaacgtgggattaccatcaagttaaacgcggtggaattacactaccatgccaaagatggcgaaacttatattttccatttaatcgatacacctggacacgtcgatttttcatacgaagtgtcacgaagtttggcagcttgcgaaggcgccttattagtcgtcgatgcggcccaaggggttgaagcacaaacgttagccaacgtttatttagcggtcgacgatgatttagaaatcgtccctgtcattaataaaatcgatttaccatctgcacaaccagacgttgttaaagcagaaatcgaagagatgattggtttggatgcttcagaagccgtgcttgctagtgctaagagcgggattgggattgaagaaatcctagaaaaactggtaacggacgtgccagcaccaacgggtgatttaaaagcaccattgaaggcgttgatttttgattcgatctacgatagttatcggggtgttgtgttaaacgtgcgggtttttgatggcactgttaaagtcggcgataagattcgcttgatgaataacgggaaagaattcgaagtcactgaagtcggtgtgatgtcgcctaaagccgttaaacgcgacttcttaatggttggtgatgtgggttatattacggccagcatcaagaccattcaagatacgcgggttggggatacggtcacacttgctgacaatccggcagcagaagcccttgatggttatcggcatattcaaccaatggtttattctgggatgtatcccgtggataacgcgaagtttaacgacttgcgtgaagcccttgaaaaattacaattaaatgatgccgcgttggaattcgaacctgaatcgtcacaagcattgggctttgggttccgttgtggcttcttaggcctcttgcatatggatgtcgtacaagaacggcttgaacgggaatttaatcttgacctgatcatgaccgcaccatcagtggattatcatgtcgatttaaccgacggcacagaagaagtgattgataacccatcagaaatgccagaaacatcaaatatttcagaagttaaagaaccgtacgttaaagcatctatcatggtaccgaacgattatgtgggggctgtgatggaacttgcacaacgtaaacgcggcgaattcgtcacgatggattacttagatacctatcgggttaatgtcatctacaacatgccactgtctgaaatcattttcgatttcttcgatgacttgaagtccaataccaagggttatgcctcattcgattatgaagtgactggctatcgtgcgagtgatctggtgaagatggatattctattgaacggtgaatccgttgatgccttgagttttatcgtgcaccgtgactttgcctttgaacgaggcaaagcgattgttggtaagttgaaagaaaccattccacgtcaacaattcgaagtgccgattcaagcagctatcgggaataaagtgattgcccgttcaacagtcaaggcctaccggaaaaacgtgctcgccaagtgttatggtggggatattacccggaagcgtaagttgttagaaaaacaaaaagccggtaagaaacggatgaaatccgtgggttcggtggaagtcccacaagaggcgttcatgtccattttgaagatgaatgatgaagataaagccggtaaataaggattcttaaaaatttaatagtgataaaatagcagttttgccaacattttgccaacgtcaattttcgttggttggcaaaactgctatttttttgtgtttcgaattattcaagatagtgctcttgccaacattactcgttctgaatttgttcgatcagactaactgtatttttgcgcattttatgagtgacatgagaataagtgtccattgtagtgctgattcgagaatggcctaaacgttcactaacgactttcattttttctctggcttctagcagcatagtagcgtgagtgtgacgtagtgaatagaaattaaaattcttatgcaatttgtcttggactaattgcgccttatatttaatcgagttaggaaggacgggggtaccattttcttcggtgcacacaaagttacggctcctatgatggaattacggacaaactgttcgatataatacatcataaaggagctttttattatggcaattaaatattcaaatgaatttaaagaatcgattgttagcttaagtcagactggccgttcggccaactcactggctaaagaatacaacgtcagtgttttaacggtcactaagtggattaaacaagctgatcctaacaacactaaagtgctatcatcaaatgaacgtgctctgattaaagaaaataaacggttaaaagaagaacttgatattttaaaacgagcggcggcgctcatggcaaaaagctaattattaaagggcgtgccctcgtgttagaagtcgtcaacgctaatttacttgctgggcaccgcattacgcgtatcttatcagtactcaaaattccgcgctcaacctactatgattatctacattggcagccaagtagaactgaacgccgccggcatttaattaaacaagaagtgttaacggcttggttaagatatccaatgtatggctacccacgattaacgatcttactaaatcaacagtctgatattcacgttagtcagcgtctggtctatcaacaaatgtgtgaattagggattagatctagaatggttaaacgaatcaataagccaaccactcagactgattatgatcagcgaccaaacttgattaagcagttaactgatcaatctggtattttattgactgatattacgtacattccccttaaccatacttggtgttacctagctagtgtctataatccagtaacccgacgggttattgcttaccaacttaatacgcagatgactaaagaactagcgactaacgttattacccaagtcatggcgcaagcagttaaaccacaaattattcatagtgatatgggaagccaatacacaagtgacttatttgaaaacactttatcgaagtatggtatcaagcattcttactcccgaaagggtcagcccggcgataacgcgcgaattgaaagttttcattcaattttgaaacgtgaatacgttaatttccaagattttaagacaattcatgaagcaatcgccggaattgataactatattcgttggtataacagtgatcgtatttcacttgtagcgtagctacaggctattaaattcaataatgttggggcttatttaatatactctaaagcgtttttaaaatctgaacgggactaaaacttcggcctctgaaaattaaattaagtaatttaaattgaaagtcaaatttgttcgtacttttatgtccggattcttgacataggagccgaagattctatggagtatctatgtaaaagaaaacactgtaacagcagctcagcttgaaagcgggtatggtgaaactcgattcagatattataagaatcgggcatgcctgcaatttgcagatgcattcatgattgaagacttgcacgagttcaagaaataaaaagtgcggtttttgtgcggattgtctgtggttattagccggatttccgtgataaattagtattatggattattagtaaagcgcgcttaaactgtggccagtaatcaccggcggaaaacggtggtcgcgctgttgccaaaaatacgatctgttatacccggcaattagcgttaatcaaactttgttaggttaatcgacttcaattctaattgctggaagcgtggggttagcacgttgttgccgtggatgatcgcggacctaaccattcctagtagcttaaatagagcagcgcggaagtgcacctgcggtcacgattcgggttcgagtcccggctaggatattatcgcagtggcggaataggtaaagcgtctttacgccttaaaacggcaattgtgtggtgcaaatccacacctgcgatattgccagtaatggcacatacttcacctccaatagtcctagcctttatggctggggttttgtattatagatttattggagggtgaaaattatggatagagaaagtttgttagaaatgatcaataatccagaatcaattttaaaggctgataaaaaaacgcttaagcaaagaatagagcaacagaggttaacagctgatgagtatgcagaggctgcaatcgatacaggaaaatctaaaggtcgagaattggttgttgatatattaaatgggtctttagggagtcttatttttgatgtgattgaaactggcgatgaactaggccaaaacatatctgatatgaaaaaatctttggtcgttgcttcttatgtacaaaaatcagacgaccacgataaagcgttacaatgtattgttgacttaattacggatccctatggtctgacattgtattcaaaattaatagaaatacttaatgattcaccggcagatgatgataccttaaatgttttagccaacgttctaaggaatataagtaatgatagtgatttaaaagaacacttttcaaataagagagttgtgttgtctatgattgccaaactatcaccacaggcactcttagtattgcagaaagctaatagatggccgattatgaaagctcccaataaagcaagcatcactgttggaggaataatgaacggtgataacagtgagtatattgcacaaggattattaaaaactgaaatatttaatgacatttcaataacatcattaggactagcaatcaaggagttagaagtaaatggactatgtttcacggcgtctggcacgtttggcggtaaaaatgcagtacaagaaactttaacagattcgggcaaagaggtatataaattaatctattaatattatcaaggcagcctaggctgtcttttttaatcccgaatatttgtagtactgtaagattgagtctacaattaaagtaagaaagaagggatatcatggtagtttatgtatttgggcttcctagtcccaaagatgtttataagcgcgcaaaggataaaattcggaaacagaagaaagataaagagaagaaagcagaagaaggaccagttgcaacaactgcttaaggtaatgaaggatgtcaatacgacgtgtaattgatgtgatgatgcatcacgaaaatcaataaagagatatttgaaaacttttttaataaagtgaaatgcaattacaatcattagggaagtagtgacataaacatgaagttgtggtatattctggttaacggaaggtgatataatgtcaaagactattaatgagcaagttttcgaaataattgatgaaatgtataatgatttggcccacaaagaaattgatcagcatattaaggatattcttttaattgcagcaaaacatttatctacagaagatatgccagctcaagtggtagcagctaaaaccgtaaatggaattacaatttggaccatgaatggtaagaacttattgggtaatgaaaacgctgaacgaatccgaaaattgatgcggattgctcgctccgagggatacaaatggaatgcgactggcttaggttcattaggcgtacaattttaaaagagtttatcttgagacagcttaggctgtctttttttgtacataaaattaaaggagtgataggcattgtgaaactaatacattcaaagtacggctacgaaacacctgaatggacggcagcagatgcccgtttagagaagtggcttaaacagaagaagatagatgagaaacgtcgttcagataatgagcggcgtattttattggagaaaaacaattataagaaggagggcggtgctatgtaatgcatgatgaatcaagaaatgatgcaaaggaagactatttatctgggatgaagtacaaagacatcgctgataaatatgatgtgtcgattaataccgtgaaatcatggaaacagcgtaatggatgggaacgtgggccaaataaaaaagcggtgcaccccaaaagcaaaaagggtgcacacaaagttgaaaaggttgcacccaaaatagtgaaggaattatctgctaatgatgggttaaacgatcaacagaaaatgttctgcttgtactatctgcaacgattcaatgccacatgggcttatatgcaagcttatgacgttgattacaagaccgctaatgtaaatggcccaaggttgctagtaaatgctagtgtgcgtgagcaaattgataagctgcgtaacgagattgctaacgacctattcgttacagctgatgatatcgctaaagagtacgctaaacaagcattcgctgatattggcgattacgtagggctcctatgtcaagaatccggacataaaagtacgaacaaatttgactttcaatttaaattacttaatttaattttcagaggccgaagttttagtcccgttcagattttaaaaacgctttagagtatattaaataagccccaacattattgaatttaatagcctgtagctacgctacaagtgaaatacgatcactgttataccaacgaatatagttatcaattccggcgattgctttatgaattgtcttaaaatcttggaaattaacgtattcacgtttcaaaattgaatgaaaactttcaattcgcgcgttatcgccgggctgaccctttcgggagtaagaatgcttgataccatacttcgataaagtgttttcaaataagtcacttgtgtattggcttcccatatcactatgaataatttgtggtttaactgcttgcgccatgacttgggtaataacgttagtcgctagttctttagtcatctgcgtattaagttggtaagcaataacccgtcgggttactggattatagacactagctaggtaacaccaagtatggttaaggggaatgtacgtaatatcagtcaataaaataccagattgatcagttaactgcttaatcaagtttggtcgctgatcataatcagtctgagtggttggcttattgattcgtttaaccattctagatctaatccctaattcacacatttgttgatagaccagacgctgactaacgtgaatatcagactgttgatttagtaagatcgttaatcgtgggtagccatacattggatatcttaaccaagccgttaacacttcttgtttaattaaatgccggcggcgttcagttctacttggctgccaatgtagataatcatagtaggttgagcgcggaattttgagtactgataagatacgcgtaatgcggtgcccagcaagtaaattagcgttgacgacttctaacacgagggcacgccctttaataattagctttttgccatgagcaccgctgctcgttttaaaatatcaagttcttcttttaaccgtttattttctttaatcagagcacgttcatttgatgatagcactttagtgttgttaggatcagcttgtttaatccacttagtgaccgttgaaacactgacgttgtattctttagccagtgagttggccgaacggccagtctgacttaagctaacaatcgattctttaaattcatttgaatatttaattgccataataaaaagctcctttatgatgtattatatcgaacagtttgtccgtaattccatcataggagcccgtgtctattagaggcgttcatgtccattttgaagatgaatgatgaagataccaaaggtaaatggtagattgcaaatttaatccgaatttttggacaaatttgtcagcataacctgatacggtgtttgccagtcgagtattttaagcggtcgctggttaatttggagtaacgtcgtcgttaaatcttgagcactaatgtgctcaaaacgagtccctttaggataaaaataacgtaaattccgattaaagcgttcattactaccacgttcagctggcgtataagcatggcagtaataggtcttaataccatattgtgattcaagtgatactagcccactaaactcagtgccacggtccaccgtaaaactatgcaccgggccattaaaagttgctagaaacttatttagggcttcattaacagtcgctgtcgtccgatcttttaaccggtatgcccaaaggaaccgtgattttcgatcgattaaagttaataaaactgcctcgtaagatatatttataagccgttggcttacaataaaatttaattattactttgatactgcgggattcttcagaatataataggaccatggaatggatctatcgggaatttgctaaaaactcctgtagttaactctactttagtaagtccgttacccgagtctttacgctctctcccaactcactagctgttttcaatcaggcttatcttcaatgtagtagtttgaaggcggcataagtccaattggtcaaaattctgttacgcgaggttgtagctgtgtaaagattttctggggaatcccgcagtatcaaagcaagttccaaataactctcgaaaggaggtccttcctgtgaaattatttgttggtttagatattagttctgaaaagattgatgcttgttttatgactgatgatagtaacttatcaatcctaaatcgtttaagtgttgctaacgatttaaatggtgcttctgaaattaaagccttaattttaaaacatcacgcagaagtatcatttgaacagattgtgattggtatggaatcaacatcactatatagttttcatccagctatgtttttccaagaagatgcagacttaaatgcactaccaacggtagtcactgttgaaaacccatttaaaatcaagcaatattctcgtgtcttcgatgaagacaaaactgataccaatgatgccatgcgaattgctgactacttacgaattcaacgttttacaacgtcacctatcaaagaagaaaaatatatggcacttcaacgtttaacccgtactagatatcaactagttaccgaattagtaacggttaaacaacatttcttagaaaacttaacttataaatgtaatacgcttagtaaggaattaaaatcagaatctaccggcatttttagcgccacaattgtacatttaatgactgaaaactactcattagatgaattagccaatttaccactagaggacttcgtccaattgattcaaaatgttggccgcagtaactttaaaaatcctgaaaaactggttaaaaccattcagcgtgccattaaaaatagctatcagttgccgcgattaatgaatgagtcgattgatattattctcagtaccttggtagttcaaatgcgttcattacagcaaagtattaaacaaattgataaaggtatcgaaaaactagttgaaataattcctgaatatcaatgcttaaccagtgtgccaggaatcggtaaggtttatgccgcaggtatcttagctgaagtcggtcaaatcgaacgatttgatgatcaagcaaaagtcgccaaatatgccggtctatcctggaaagttaaacaatctggaaattatcagtcagaagtcacaccactaacaaaacaaggtaatcattatttacgttattacttagttgaagccgccaactcggtaaaaaatcacttacctgaatacacagctttttataaaaagaaatataccgaaaccccgataaataagcaccgccgagctattgttttaaccgccagaaaatttgtgcgtttggttgatgcgctactacgcaatcaccaactttacacaccaccaaagagtgtgttgaaggaataacgtagttattcacgcaaatctttggaatacctactaaaatttttatgaattttaagtaggcttagtttagtgttgccaattttgtaaaattacacgatatttatatcaattatcttcttgacttattaccactagacttactatgcccacgaggaccaacgactgtatctagttcaaaatcgccgatgcgattacgttgattaatcatcatgggacgctgttcaattgatcgccccaaagattgattatatttggatcgttggtcaacgttacgccgttggcgtacgccatgttcaggtagatcattcaaggagaaaccaattctcccctgatttagccaattataaatagatttagtagctagtttaaattcgtgagcaatcattcctggtgaccagcttagacgtaaatggttgagaattttttgctttaactcatcgctcagcttagttttccgaccacatcgtgatcgcttgtattcggcatctgtttgtgctaattcagcctgataaggttgacatcgagataattcataagaaattgttgacggtgatcggttcagccgaacgcccatttggatattggatagccctagttcacaaaaggtttcgattttaattcgttcggaataggttatactagacaaaagatcagctcctaaaagatgggtttgtggtaaacaccattttaaaggaagctgatcttttttgtccgaacagcgttcggattaattttacaatctaccaaataaaaaaataaaagcgtgctagtcgaggctgactagcacgcttttttgcgttattgaaaagaaataacagttttaccaacacgttaatggatagcgattgagacgagcaggatgtttggtccctataaaaagccgctccagaaagctattcatgctgcgcgctgttgatgggtgcaaataacttaatgcaatataatgcgctaagtccaacaaggacatatacgatgcgcgaaataatagctgcttgaccgccaaataacatagcgactaggtcgaatttgaatagaccgacaagtagccagttcaaaccaccaacgattaataaagtaagcgcgatattgtctaaggttttcatagtgacacctcctttagtagttaagataacatcctcaaaggtggggaacaataaaattgcttagaccaagttttgtaacttagcaaagaattaagggtggttttttagaagatagattgcaaaaaaagcatgctagtcaaatttgactggcatgctttttggtgtttattgaagcatatcgattagtttcagaaagatcatcatcacgaggatgctgacccaaaagagcacattcgatttcttcttaagttggtcatttttcttttgttgggcgatgaataagatgactgatgaacttaagacgccgattgcagcaatgatcacgatcaataataaaatgagatgttgagcaggtgacatgatgaggctcctttaactgattgattctaaggagcagtataccaaaaaaatggagagacgagaatagtgaatctacctgatgaagcattaactcttggtaagatacatcgtttttaattggttgagatccgccttagtcaaacccagcccgtgtttcaaataaccattaacgccaccatattctttgttcattgtgtcatatgcggcctgtagatagggtttacggacggccatcattgcagtgatcgttttaacggctttggggttattgtgagttgccaccttaatttgttcaattgtcttttcattttcggcgcggcgatatttattagaggcgaggtagtcgtccatgatgctcttttgatcaaccccgagggcactgaggactaacatagtaccgaatccggcacgatctttaccggctgtacaatgccaaagtgtcgcaccacttttattattcaataagacattaaagaactgtttatagttcgtgcgtgctgcgggatcagtaaccaatttttggttaatatcaatcatgaaagcttcaccatcaaccttatcgagattcttgaaaaagtcagcttgacttgccgaagtccctaaagacttggtgacatcatagtgattgtagtggacgttgcttaaagcgggatcgggtttagccgcaacttcgctactagtccgtaaatcaacgatgttatttaattgttttccaacggttaacttctgtttatccttcgttgttaaaccagctaattcaccagaacgaattaaccgattggctttaattttggcacctgttttcgtgacaattccacctagatcacgagtattaatcgcaccggctaattgaatgtggcgactcatgttttgtttagggacaagggtggattgatgagctgtcgattgtttagtatttttttgtggggtacagccggctgccaaaagtaataaagttgttgttgccacgtaagggatgattgtttggctcatgcgcatattgattgcttcttgtaaaacgattttttattctttacaaggttaagcataaacaataatgtaaagtgtttgttgttctagtgaaaataaagtgtaaagcttcgtaatggtttggtaaattcataaaaaaaagcctagtagtggtttaatgatacaatggggttaacttttagatatggaggatgataagatgcatgcaacgcaactattaagtgcaacggtcgaacgcgctcaagaacgattactcgatacattggaacaaatgacagtggctgaggccaatacaatgccgcagccactaattaaatcggtgacctggttagtatggcatactgcccgtgaaatggattatcagattgcggatttgaaagggatacaaccattgtggatacgtgcaggttggtcacaaaaatttgcattagatctacccgatgaaacgcaagattggtcgcattcaccagaagaagcagccaaagtgattatcatcgataaagcattattaattggttacttagcagacgcattgcaattgacgcttgattacctggctgaagttactgacgagtctttattagagataattgatgaaaattggacaccggcagttacccgtgaagcacgcttagtctcaatcgtggatgatgcggtcatgcattccgggcaagctgtttacactagaagaatggtaatggggaaataactgctaggacaggattggaatcggtttaacgaataattagtgaagggtaaaaatagataccgtatggtatctattttttgttatccggcaattgaattgcgtgctactatattaaatgtaattaataataatttggaggaattatcaatgaagacaaaattattttcagcattagcaacaatggtagcaccaacagcaatgacagtggggtcagtatcagctgatgcagttgctccgcaaacatcaaaagccgactttagtgttgttgctaaggatccaacaaacccaacagatcctgaaaatgggacattagtattaaaatcagtaccaagtttcagctttgggacaattgaagctagtgggatttatgctggctttactggtaaagttgctaaaacagctggcgctttagaaattgctgatatacgtttaggcaaatctgactggtcgttgacagctgacatggctcaattcacagatgatgctaataaactaacaggcgcaatattgaatttagattctactggttcacttggtgaaactttaacaggtgctgttaaggacgattctcctgccgttgaagtggttaaaggtaacgggaaacatggtgtcgataatttcaagatggaagcagctacgttaacattagcagcaaatccagcagccgatttagctaaagatgagagtttcacaacaacaattaattggaatctttcatcaacaacaccaactgcaccaactgcttaatcattttactattaaacgcacgaaataagtgaataaagttaacgaagcgattgatgtggagggtgaaaagtataagccagattcgtattatactggaaaattgaataaagatccgaatacaccagggattccagctaaatataaaattgctgcagggaatgtctctaaagagaaaacggtttatgttggtgggttagcagcctacaagaaagcggcggatctcggtgggacttggtcagttgatggtttatcagacctagctaaggcatctggttcaacgagtaattggcattatgaatggcaatttacagatggtgaggataagacaataacccccgctactaatagtggtgtttctaatcttaagggtgacattacaaatttagcgaacttaaatacggaataaccactaacctttagtaaagatagtactttcatgaaagatgctgcagctgcaactacggctggaaagagttatcgagcacagctaacattaacgactaacgtaacggaagaatcaagtggaagttcaaaaaaagttacgattgtttctaacgaagctgaattacaagcgcaaccagcagttggtaagttgtcattggatcaagtgcctagctttagatttgggaacgtcttatcaaaagatatttatgttggtacaactgctcaggacaagcaatatcaggtcagtgatgggttgaaaatcacggataccagagcaacgccaggttggaaattgacagcgaagatgagtaaaatggcatcaaccacaggcaaacaattaagcagcacagccattaatatgactggcttgccaacgaacgtaggattatctgataatggtactgaaacaccgattatgacggataagatgtcgaaaacatggcaagttgctgggaaattagcattaagtgccaatccaagtattcaacttgcggctggtgatacattctcgagcaacattacgtggactttaaatagcgcacaacccgcagcaccagcggcttaagttgttgattagaattaataagtaaattaaaaaagatgaatgatttcctgaatatcagggaaccgttcatctttttttgttagtcgatatatttaacagccgtgccataagcggcaactgattgcatatctgttccgattgaaccggaatcaaagcgcatcatgacaaccgcatctgcgcccatttcaagtgcattttggcgaagccggtcgatggctacatcgcgtgattcagtcatcatttcagtataggctttgatttcgccaccgacgacatttttcaatgaagcgccgatgtttttgaagacgttcttggattgagtggttaaaccgaaaacttcaccgagcacttcatattttttaccaggaatagtttcggtggtggtgatgagaattggatttgtcatgattaaagcccttttttagaagaataagattaacaataatgtgattaaagcgggtaagccttgtaagaagaaaattttcttggtggcggtaaatgtcccgtaaagggcaacgatgaagatgtagagcattaatagggcgaggacaatcttgagcgtttggccggctaataacaggttgaccatgataattacggcgcccaacattccgttataaatgccttggttggccagtgccacgcgggcatttggtagtttgacaaagtccagcggcatgtcaaaagctttcgcccttgtttcagcactggcaaacatttccagccccatgataccgatgtgttcaacggcgattagataagttaaaacaagaatcaatacttgcataagttagtgcctcctcaatggtggtttcattataacaaaaacaatgacgcatgtccaaattaggccataaaaaaacacgccagagaatttctggcgtgttccttcatcattaaccgcggtctgtataaccgttgggatgatttaaatgccaattccaggccgtttcaataattgcttccatattgtcatactgtggcgtccaacctaagacttcgcgtgctttgtcacttgcagcaatcaaagtacttggatcaccagcacgacgcggtgccattgtcacaggaattgccttgccagtcactttgcgagcggcttcgacaatttccatatttgaaaaaccagttgatgagcctaagttaaaggcgttactatcatggccttcttcgaggtaaccgagggccaaaatatgggcgtcggctaagtctaacgcgtggacatagtcgcggacgttagtgccatctggtgtatcataatcatcaccaaagatggagagttgttcacgtttgccagcagccacttgtaacacgattggtaacaagtgggtttctgggtgatgatcttcgccgattgaaccatctggtttggcaccagcgacattgaagtaccgtaatgcaacgaatttaataccgtaagctctgtcagcccatttcatcatcgtttccatcattaatttactttcaccatacgggttagttgggacttgtgggtcggattccttaattggaattgatttcggttccccataagtggccgctgttgatgaaaagacgatgtgtttgacgtcgaattcattcatcacctcgagtaaggcagtcatgccgtatgtgttattgtcgaaatatttaagtggtgcttgcatcgattcgggcacgattgagaaagcggcgaaatgaatcacaccgctgactttttcttgttggaagacgctgcgcatgaaatctttgtcgcgaatatcgccttgataaaagcgcgcttgtggattaatggcggcttgatggccggtgacgagactgtcgacaacggcgacatccgtgccgcgttgaattaattgatcaacggtgtgcgagccgatgtagccggcgccacctaatactaaaactgtcatggttgtttccccctatgtaataaccttgtgtatcaattaacagtatatcatttggactgataaacaaaagcattgattggattattaaacgaaatataataatctttgctataatgggtaagttaatgatttggaagtagcgagggattaatgtggaagcacaatatgaatggcaattaaaagcaacaccaactgaccaagacttacaagcaataatggcagttgaagcactcccgaaagccgcagcccaattgttgtggcaacgaggaatcaaaacacctgaggcaatcagtgcgtttatgcatccgaatgtcggtcaattacatgatccatacgctttgtatgatatgcaaacggcagtcgatcgaatccaagcggctgtgatgggcggcgaaaaaattacagtctacggcgattacgatgccgatgggattacaagtaccgctttgatgcaagagacgctcgaaagtttaggcgccgatgtggaagtatatgtgcccaaccggtttaaagatggctacgggcccaatttagatgtctataagcaactcgttgaaaatgggacccagttgattgtgaccgttgataacggggtgagtggcttagagccaatctcctacgcgcaagaacacggtgtcgatgtagtggtcacagatcaccatgaactaccaagtacattgccaaatgcgacagcaatcattcacccccgtcatccagagggacagtatccctttagtgatttatgtggggttggggtggcatttaaagtcgctacggcattattggaagaaatcccttacgagagtttggacctagtggcgattgggacggtctgtgatttagtgtcactgactgatgaaaatcgcgttttagttagcttaggcttacaacaattacaaaataccagtcgtcccggtttagtggctctttgccagtcagcgggtattgaacaagaaacgcttgacgccacatcgattggatttgggattgggccacgtttgaatgcgattggtcgcttaggtgatgccaacttaggtgttaatctattaacgactttcgatgaagaacaagcggtggaacaggcccaatttgtggaacaacaaaataaaaagcgccagggtcttgtgcaagaaattactgcgctagctagcgaaatggcacaaacacctgagaaccaagctagtgcgaccttagtgttggcacatgaaggctggcatgaaggtgtgctggggattgtggcgagtcatatcgttgaacaaaccggtaagccaactttagtgctagcaattgatctagcaactggccaagccaagggatcgggacgaagtgttgaagcatatcatctctttaaagcgcttgatgcccaacgcacattgttgacgcactttggtgggcatcatatggctgttggcttaacgatgccagtcgatcaattggctgctttacaaacggcgatgaatacttatgccgctgataatcagattgatttaacaacgaaacccacattggcggttgatttacaactcgcattagctgatgtgacgcccgatgtttatcaagccatcagtcaattagctccttatggcacggataacccagaacctttgattgaaatgacggtgccatccgtcaccaatgtgaagcagatcggtgcggatcagaagcatttgaaatttacggcggttgatcaagaagcgcagttagcagtcttagcatttaaccgtggtgcgttgtacgacgatttacaagcggtggaacagttgaaattagttggtcaactaagtgagaatacttggcgcggcaatacgacgttgcaattgatgctgaaagatttacaaacgagtgggcaagtgttaatcgatcaacggagtaatcggttgacgcaacagttgtttaaagctagtggcacctatgtctttttcaatgagaagcatctggcacagctacaaagttatatcccagccgacagccaagccatcttagcagccgatgtcgcacagcaagcagaattgattgtggttgatgaaccaactgatttagatgaatttgaagccttttatcgccaacaacaggccactaaaatcagctttatcttctatagtaagtattcggcatatcttgatggtattcctgataagaaacagtttgcgactttcttggtttacctacgtcaacatccaggaattgaaaaagcacggttaggggaattagcgacttatctaaaaattaaattgccgctattaatttttatgttgcaggtgttttttgacttaggatttgttaaaatagaatgtggtctcatttcggccgcggaacaaccggaaaagcacgcattagaaagtgcaccaagttatcaacaacgattagctaaaattgacatggaaaagcagcttgtttactcaaccttcgcggagatgaaagactggctggcaggattcaatcagtagcaaactgttgaaagagttaaggagcgaatttaaaatggcaatcaactttaaagattacgttgcaagtgtgcccaacttccctgaagaaggtgtcacattccgtgacatctcacctttgatgtctgatggtgaagcatatgcagcagcaaccgacaagatcgtcgaatacgcaaagagtaaaggggtcgaaatgatcgttggccctgaagcccgcggattcatcgtcggctgcccagtagcttacaaattaggcgttggttttgcaccagcccgtaaaaaggggaagttaccacgcgaaaccgtctcagcaagttacggcttggaatacggcgaatcaacattatacatgcacaaagacgcggtcaaacccggtcaaaaagtgttggtcacagatgatttactcgcaacaggcggcacaatcgccgcaaccatcaaaatggttgaagaattaggtgggattgttgtcggaacagcctttttaatcgaactaaacgatttaaacggtcgcgaaaaaattaaagactacgatatcttcaaattaatggattactaatgagtgtctttctaagctgggagagtctgagcattaacttaggttggtgaataaccgatgaaatcggttgtttgccaaccgacgttaagcgcaggaatctagcttagaaagcgcgttaataaatgagtgtctttctggtgcggttaacttctgagcattaacttaggttggtgaataaccgatgcaatcgggttgtttgcgggacgtggctagacggaagaaattgcatcagaaagcacgttaagaaaaaatgtaacgtcagtcagtcgctaaacgtaaggacctggctgaaggaacatgctaaaaaaggattcgccataacggcgaatccttttttgatagctacattctgtcgcggtataggccaacgaccttacctaagatgctaacttcattcaaaataataggttcaaatgtatcgttttctggttgtagccgataatgatcaggttccttgaagaatcgtttgcaagttgcttcatcttcagcagtcattgcaatcacgatgtcaccgttatcggcagtcgcttgtttacgaacgatcacttcatcgccgtctaaaattccggcactaatcatactttcgccgcgaatcgtcaacatgaacaaatcttgttcagtttgtagacttggtggaatcgggaaataatcggtcgcttcttcaaccgctaaaatgggcaccccagctgtaacaacaccgagaaccggaatcttcttctgtgatgcaccaattgctgtcaaaccagctgctgttaattcaatggcacgtggtttagtcggatctttttgtaaaaagccttttttctcaaggcgtgctaaatggccatgaacggtagaagtagaggataaattaacggcttcgcaaatttcacgaaccgttggcggataacctttatcttgaacgcggtcatggataaaacgcaagacctctaattgcttggattctgttctcgtcataagagcacctcatttgttctaatagctatatattagcatacctatagcgggatttcaaacaagcgttcgtgttttttgacattttacggattttagtccaaaatagacaaatagtttgaattggagggcaacaagatggcaatggatcaaaaacgattagaccgaattaatgaattagcacacaaagcaaaagctgaaggactaactgaagctgaaacagcagaacgtcaaacactgcgcgatgcctatttaaaggatttccgcgaaagtttccgctcacaagttgagatgctacaagtgtatgacaaagaaggtaaggaagtcactcctgaaaaagtgaaggatatccaacgggaaaaaggcttgcgtgacgattaatcttagaattccgctttctttttaggttaattatgtgtaaactatttaagtgaactgaattaggaaggggtgcataagatatgggattaggcattttattatttgtcattggggctttattaggcgcagtcgctggtttctttggcgcacgtgcttacatgaagaagtatttccaagacaatccaccaattaacgaagaaatgttaaaggctatgatgatgcaaatgggtcaaaaaccatctgaaaagaaattaaatcagatgatgagctcaatgaaagcacaacaaaaacgtagcaacaaaaaataaaacagtcaagtcggttttaaaagggtttctaacgaataagtcgtttgttagaagctctttttttatcataataagaacggaaatacaaatgattgtccggcttaattaagattgttataataggacttatcgaattttagaggataggagcacaacatgggaatttttaaaaaactagggtggtattttaaacaagaataccgccgctatttatggggcgtcatctttttagtcctcgtggcgattgtccaaattgtgccaccaaaagtgattgggaccctggttgatttaatggacgccaaacaattaacggcccaaaaattaatcatgtggctcggcgtcttgttaagcgcagcgattttacaatatgtttttcgctatggttggcggacccggatttggggtggcgcggctaaactggaacggacattgcggagtcgattgttctggcatttcatgaagatggacacgaccttcttccaaaaacatcggacaggtgacttgatggcacatgccacgaatgatttaaccgcgattcaacaagtggctggtgccggtattttaacctttgccgattcaatcatcactggtgggacaacgattattgcgatggtgattttcgttgactggcgcttaacgttgatggccttgattccaatgcccttgttggccgttgcgtcacgacggttaggtgcacatttacacacagcgtttgggcaatcacaggcggctttttcacggttgaatgataaaacccaagagagtgtctctgggattaaagtcttaaaaacgtttggccaagaagaagctgatattaaagatttcaacgagattgtcacgaagacaattgcgattaataaacgtgtgaatatgattgatggtttatttgatcccgccatcagtttgattatcgggttaacgtacattgtaacaatcatttatggcgggacgttggttatgaatcacagcatttcgattggtcaattgatttcgttcattagttatatcgcggcgcttgtttggccaatgtttgcgattgggcgcttgttcaacgtcttggaacggggcaatgcgagttatgatcgggttgatcaacttttgaaagaaaccagcaccattgtcgaagcaccggatgcgattcaaacactagcaactggcgatattcattatgctgttcaaaaatttacgtaccctggcgaaaaacaaccaacgctcaaacaggtggcgttcactctgccacaaggtaaaacgttgggcattgtcggaaaagttggttcgggtaaaaccacactgattaaattattattgcgtgaatatgatcagtatcaaggcgagattcaaattgatggtcacgatatccgggattattcgctggatgcgttacttgatagtatcggctatgtgccacaagataatttcttattttcaacggatgtccgcgacaatattcggtttgctgattttgaccgaaatcaagcggcggttgaagatgccgcgatttcgagtgcggtgcatgatgatattttaacgtttgtccaaggttatgaaacggtcgttggtgaacgcggtgtgtcgttatctggtgggcaaaaacaacgaattgcgattgcgcgagcgattatgactgatccagaaattctgatcttagatgattcgctatcagccgttgatgcaaagactgaagaagcgattttaatgaatttgaaaacgatgcgggctgatcaaaccaccattatcactgctaatcgcttgagtagtgtgatgcacgccgatgaaatcattgtcatggatgacggtcaaatcactgaacgtgggacacacgaagcactccttgccgcagatggctggtacgcagagatgtggttgaagcaacaattaagtcaagccttaggaggtgcataagatggccaagcaatatcaatcagaatggtccaagaaagttccattgaaagagcaattgcacatcatgaaacgcctctttggttatacgaaacgctataaacgccaatttatcggcgcaattgtggccgccgcaggtttagcgaccatcaatattttattaccacgattactacaggtctttatggatcgttacttaaccaatcagagtgcgaccacccaagttttaatgggggttgcggcgttgtacggtttaggcgtgattctcaaagccattacacaatttttccaatctttcctttttggaatgggttcggaacgcgcgatggaagatgtccggcgcgatttattccagaagctccatcaactcgggatgcgttatttcgatcagacgccggcaggttcaattgtctcacgagtaacgaatgatacaatgaccttgattgattattggaatgttttcttatccttgttagtcggttcattttcaatcatttcggcgttcattgcgatgtggttgatttcaccaaaaattgcctttgcaacggcagcgtttctaccaatattgttaattgttatctggtattacagtagttacagtgcgcgggtttaccggcatatgcgtgaaaaattgagtcagttgaatacgaaactcaacgaatcaatcgaagggattacgattatccaacaattccgccaggaaaaacggttgaccgacgaattcgaacaagttaacgcggactatttaaaaacgcgcgaagcgatgattcgaacgaactcgttgttgctcgcaccaattgtgaatttactctatacactggcattggtcgttgtcttgagcttgtttggtgtctcagccctgcatagctttgtcacggcgggtttggtttatgcgttcacaacctatgttgggaacttctttaatccgatgaccaatatgatggattctttatcatcattacaagatggaatggtcgctggtcgccgaattttcagaattctcgatcaagaagaatatgcgccagctcaaaatgccgatgctgcaaatgaaattactgagggtcgcgtcgaattcaagcatgtttcgttttcatacgatgggaaaaatgaaattttgcatgacatctcatttgttgttgaacctggacaaactgtcgccttagttgggcataccggttctgggaaaagttcaattattaatgtcatgatgcggttctatgaattttatgaaggtcagattctaatcgacggacatgatattcggagttttcagacagcagaactgcgccgcaagatggggcttgttctacaagatgcattcatgttttatggtgatgtcgcatcaaatgttcgattatttaatcaagagattacagatgcccaaattcgcgcagcggctgaattcgtgcaagctgatgactttatcgaacaattacctggtcaatatcatgctcgtgtaattgaaggtggcgcccaattttcaagtggacaacgccaattaatttcgtttgcgcgaacattggttacaaatcctaaaatcttggtcttggacgaagcgacggctaatatcgatacggaaacggaatcgatgattcaaactggtctcgctcggttacgtcaaggacgtacaagtattgccatcgcgcaccgtctatcgacgattcgcgatgctgaattaatcttggttttagatcaagggcagattgtcgaacggggtaatcatgatagcttagtggctcaaaaaggacgttattatgaaatgtatcaactccaaaatggtggcagtgaagaataagcagtttcaaaaaaacacgactattattattgcggagtaaatcgggaggaatttagcacatgaagaaaagacgctggctgaaatggtcgttaattagcgttgttgtcttagtggtggtagcactatttggtgccactatgtatatgtatcaatacgcatttgtaccggggcaaaaatcatttttaaatggtggtaagccaacgaaagtctatcaagacaatcaacgttggttaaaaaatgttaaacaatcaaagtggcatcaacaatctgccacagatgatttaaaattggcggcaatttatgtgccagcaacaaaacctacgaacaaaacaattttagttgcgcacggctatatgggtaaaaaagaggatatggcacgctatattcacatgtatcacgatcttggctacaacgttctcgcgccggatgaccgtgcagcaggtgaatcggaaggcgatgccattggctatggttggacggatcgcttggattacgtcaagtgggcccaaaaaattgtcgctaccaacggacaggatagtcaaattgcccttttcggggtcagcatgggtggcgcgaccgtcatgtttaccgcgggtgaaaaattacctaagcaggtgaaagcggtgattgaagattgtgggtataatagcatcgctgacgaactcgcataccaactaaacgatctctttggattgccgaaattcccgttattttacacaacgaattggatggcacgggttcgcgccggctataactttaatgatggcgatactgctaagagtttagctaactcgaaattgccaatcttcatgatccatggcgatcaagataaatttgtaccaaccaaaatggtgtatacaaattacaaagcggcgcatgcacctaaacaactctgggtggttccgggggcagctcatggtgaagccttggctacagatccaacaacctatcgtaataaagttgcgcaatttttaaatgaatatcttcaataagtctgtttaattgtattttgaagtcgatttggtgtgatagatatataaatatattgatatcgctaatccgttaggtgaggctcctatatgaacaaacgctgctactcagaaacatcgagagatgccaattgagtcaacagaaactgccctgaaggctttttctaatgtagctgaacaaagttctacgtcatatagtgctaaagctcaacgattggaatggcttgtttttcttgtgaggcatcctttctttgaggatgccttttttatgcggatcagctgcgaatgagagggattacgatggctaagacaattaaaatgacactcaatcagattaatcaattaacgccaaaagcgagtttagaacatttcgaaactgacaagaaggggttatcacggcagcaacgaacagcacggttacaaacctatggggaaaatacgattcaaaagcggcaacagcgttcgttattgcgagctagttggcagagcgtgcaagatccgtttatcggcgtattagccgtcttaatgatcatctcctagctcagtcgagatattgatggcgcgatagttatgttaatcatgattgttgtgtctagtagcattcgattcgtgcaagagcgcaagtccgagcaagcgagcattgctttacaagcgatgttggcaaagaccagccgggttgtaattgagggtcaaccaactgaagttgccgcacaaagtctggtacctggggatattgtgcagctgcagacgggggatttggtgaatgctgatttaaaaattctggcgagccatgatttacaaattaatcaatcttctttgacgggtgaatcaaaacccgtgagcaaacgcataacagcgcaagcaactgacgtaacgaatgcggctgatatggcgagtttattgctgatgggcagcaccgttgtcaatgggcaagctaccgcgttagtgattgccacgggtcaagcgacttgctttagcgcaattgtgactactgaacctaagtcgcgaccgaatcaatttgatgcagggttaaaacacatcagttggttattaattcgcatgatgctcgttttggtgccctttgtacttgtgattaatggtgtgactaagggagattggcaacagtcgtttttctttgcgattgcagtggcagttggtttgacaccggagatgttaccgatgatcgtcaatagtaatctggcgaaaggcagtgtcgttttaagtcaacaacaggtcatcgtaaagcagttaaaagccattcagaatctcggggcgatgtcggttttatgtacggataaaacggggacgttgacggaagatcatattaaattgatgtactatgcagatattttaggcgagcgggatgtgcaagttttgcgattagcatatttgaacgccaagggtcaatccggctggcagaaccttctggatgaagcgattattcattactatgaacaagaccaaaccaatgatgactttccatatcaaaaattgggcgagattccatttaatttcgagcggcggcggctaacggtctggatcaaaaaccatgcaggtaatcaattagtgccaaaaggggcctttgaagaagtgctagcaacgtgttcccaagtcaggttagcggatcagattgagccgttgactgaagtgcaaaagcagaacctagtggcagtgcatgatcgtttggcacaacaagggatgcggatgctggcggttgcttatcaagatgagttagcagagacggcatcaattgaccacgttggtaatcaaggtttgattttcgccggctttttgggctttttggatccaccaaaacaatcagctatctcggcaattcaacaactacaagctcatcaagtggcggtcaaaattttaacgggtgacagtgctttaacgacgcagcaagttgcccaaaaagtgggcattcagaatctagctgtgaccactggtgagatgttagagacgttaacggatgcgcaagtcagtgagctattaacagagcaagcattatttgccaaattggctccacttcaaaaagcgcgtttaatccgtctattacaagcacaaggggaagtcgtcggtttcatgggcgatggcatcaatgatacgacagctttgaaacaagcagatgtcgggatttcagttgataatgccgcagacctcacaaaggatgctagcgatgtaatcctactggaaaaagatttgaacgttttagaacacggggtgctcgaaggacggagagtctttatcaatatgtataagtacattcggattacgttagcttctaatctagggaatgttttgagcgtgctggttgccagcatctgtttaccatttttaccaatgttgtcactgcaaattcttgtccagaatttactgtatgatgtcgcccaactctggttaccttgggatcgggttgctgaagatcaattgcgccaaccaacgcagtgggcaactaaaggcttactgaagagtgcgtttattctaggaccgttgagctcaatggttgatattttaacgtttacgattctctggtttggatttggcctgcaaacatcagctcaacagggggctttccaagcgagttggttcgtcgttggtttattgacgcagatgctagtggtttatgtattacggacaccagcatcaccgttcaaggatcgcgcaaattggcgtgtttacttggggagtttaatcagtttgttaattggaggtattctggtattgacaccgctcagacaagccgttgatttccaagcgattccaacacaatttggctggattgcagtggtattagttactgcctatctattggtgacgaatgtggttaagaatttaacgcgttaaaaaaactgctagatgatatcatctagcagttttagcagttttttgttattattttttatcaggtagttcatatttaaaatcagggttaatttcgtggtcaatttgatcaaatgcggcttgcatttgatgattgacaacttctaagttttcttcgttgagttttaatttcggatcgattgggattggttcaccaaaacgaatcgtaatctttttccgttttaaaacatcagagaattttaatggcccttggtagactgctggtacgagtgggacccgcgccatcttggcaattacgaccgcgccgcctttaagttcgcttgaatagcggctaccagtggggaacatgattaacgaaagttcttttgagcggagggctttcactggcgttttaatcgccgatgggccaggatttgttcggttcacaggaaatgcgtttgcgtgggttaagatgaagcgtagaattgggtttttaaagagttcttctttggccatgaacgtgaactttcggggactagcagcaagtgcgaagaagattggatcccaccaagtccggtgcgggccaactaaaacataagtcccttcaggcagggcttctttattttcgaccttcaaattgccattcaataaccaggctaaaatgcggacgataaaacgtgcaaatgagaaaaacatagtttagattcctttcaaacgtgactagtatctgctcattataccaaataatgatactctttgttataatatgcctaaatacaaatgaggttgaaggtagaacgatgttaaaagcagatgagcgaattgaccaattatttcgcttagatattcagattattcaaagcccatccgtcttttcctattcgatggatgcggtgttgttagccgactttgcccagttaccaaaacgcgggacgattgtcgatttgtgtgcaggcaatggggcggttggattattcatgagtcccaaaacaaatggtcaaattatcggtgttgaacttcaagaacggttggccgacatggcacaacggtcaatcgaattaaatgacttaaccgaccaggtgacaatgctcaatatggatttgaaagacgttaacactaagattcataaggacagcgtcgatattgtgacctgtaatccaccatattttaaggttgaacccaatagtcaaaaaaatcccaatcaacatctggcactggcgcggcatgagattgcaacggacttacgcactgtggttcaaaccatgagtggcttgttaaagatgaatggtaaagggtatttagtccaccgtcccgaacggttcttagaaatctgtgacgaactacgcgccgcacgcatggaacccaaacgcgtccggtttgtttatcccaaagcaggcaaagaagcgaatatggtgttaattgaagcggtcaaagatggtaaaaaagggggcttacgaatgcttccggaactgacgatttatgaccaagacagccactatacaccagagatgcgcaggaagttattcatggctgacaatgactgagaaggcttattatttttacgtattagtctgcgccgatcatagtttttatgggggtttcacgaccgacgttaccaaacgggttgccacgcacaatgttggcaaaggtgcgaagtacacaaaattgcgccgaccagtgcggttattatattttgaaacgtttagtgataaatctgcggcgcttaaagcagagtatgcgttcaaacatcaaccccgccgcaaaaaagaacaatatttaatggaacatggcatttcaagaactcaattttagaatggagagaccaatatgcaacctaagttagttgtcgatcaacacattcatttacaacctgtgacggaagcggatgcgccggcgttatttcagttagtggaccaaaatcgcgtcaatctcgatacttggttaccatgggtgggcgatatcgaatcagtggccgatgagcttggctttttaaaatatgcgcaacaacaaatggcaaaccaggaactttggatggcaacgatttgggatgaccaccagttagttggtacgattgatgtccacaatattgatgacttgaatcgtgcgggtgaagttggctattggttagatgaagctttccgcggacgaggtgtcatgcatcgcgcactagccgccattgaacaatacgcggccagtgaattggaacttgaccagttgagtatcattgctgcacacgaaaacgtggcgagtcagcaagtcgcgctaaaagcgggctatcgagcggttgaaacagtgagtggcgttacctcagtgaaccaccaaccacaagatgcaacccgttatcagaaacaattgggcggcatgtaagttcttgttgacgcgccttgttatttttagtatacttttaaacggtatttcaataccaaaaaataattcacactggttgatttctagagaggtgcttggcgacaagttctctaaaaaagtgaaaccagtggtcgaaaaaaaccatatggaggtctgttgacatggctgtattgtcaatgaaacaattattagaagcgggtgttcacttcggtcaccaaacacgtcgttggaacccaaaaatgaagaaatttatctttactgaaagaaatggtatctacatcatcgacttgcaaaagacagttcgcatggttgacgatgcttatgacttcgttaaagaagaagctgctaacgaaggtgtattcttattcgttggtactaagaaacaagcacaagatgcaattgctgaagaatcagtacgtgcaggccaatactttgtaaaccaccgttggttaggtgggactttgactaactgggacacaatccaaaaacggatcaaacgtcttaaagaaatcaaagcaatggacgaagatggtacattcgatcgtttacctaagaaagaagttgccttgttgaagaaacaacaagaaaaacttgaaaaattcttaggcggtatcgaagatatgcctcgcatcccagacgtaatgttcgttgttgatcctcgtaaagaacgcattgctatcaaggaagcacaaaaattaaatatcccagtcgttgctatggttgatactaactcagatcctgatgatattgatgttattatcccatcaaacgatgacgctatccgcgctgttcgtttaatcacagctaaaatggctgatgctatcatcgaaggccgtcaaggtgaagatgatgttgaagaagctacatttgctgcagaaaacaaatcagcagactcaatggaagaaatcgttgaagcagttgaaggcgacaacgatactaacactgacgctaaatagtagattcaaataagctgtcttagaggtttcgcaaatactgcctgacttgtgggacagctttttttaaaccaattatattgaatataaattgtcggaggtatgaattatggctgaaattaaagctgctcaagtaatggaattacgtaagaaaactggcgttgggatcatggacgctaaaaaagcccttgtagaaagtaacggcgacgttgctcaagcaatcgatgctttacgtgaaaaagggatggcaaaggctgctaagaagagcgaccgcattgctgctgaaggtttagcaggcatcgccatcgatggtaacactgctgcaatcgttgaagtgaactcagaaactgacttcgttgcttcaaacgatcaattcaaagctttattgaaagatattgctgaaacaatcgctaaaaacaaaccagctgacatggctgctgcagaagcattaccaatgggcgaaggcacaattgctagctcagtaatcaacttaactgctgttatcggcgaaaagattagcttccgtcgtttcgaattagttgaaaaaaatgatggcgaccactttggcgcatacctacacaatggtggccaaatcgcttcattagttactttagaaggtgctgacgatgaagcagctcatgacgttgcaatgcacgtttcagctgttaaccctcaatacgtttctcgcgaagatgttcctgctgaaacattggatcacgaacgtgaagtattaactgaagaaacaaagaacgaaggcaaaccagaaaacatcattcctaagatcgttgaaggccgtgttaacaagttcttgtcagaaatcagcttgaacgaccaagctttcatcaaagactcagatcaaactgttgcacaatttgttgcatctaagaacggtagcgttaaaggtttcgttcgtttcacagttggtgaagggatcgagaaaaaagaaaataactttgttgatgaagtcatgggccaaatcaaataagcttattttgcttcaaaaagggaacgcaatttgcgctccttttttttgcagttttacgataattcagaatcgtatacccaaataacttattaaatatggtaaaatgagcctagtaatcaacggagggatatcaatcatgtcaaatacaaaatacaaacgcatcgtcttaaaagtgagtggtgaagcacttgctggcgaccaaggtttcggaattaaccctgaaattgttaaagtagtcgcaaacgaaatcaaatcagttcacgatttaggggttcaaattgccattgtctgtggcggtgggaacatctggcgtggtgtgactggtgaacaaatgggcatggaacgtgcacaagccgattatatgggcatgatggcaacggtcatgaatgctttagctttacaagataacttagagagcattggtgtcccaacgcgtgtgcaaacatcaattgaaatgcgtcaaatcgcagaaccttatatccgtcggaaggctgttcgtcatttagaaaaaggccgcgttgtgatttttgctggtgggacagggaacccttacttctcaacagatacaacggctgcattacgagctgctgaaattgatgcagatgtgatcttgatggctaagaacaacgttgatggtgtttactctgctgatcctaacactgactcaagtgccgttaaattcgacacattaacacatttagatattatcaacaaaggcttgcaagtgatggattcaactgcaagtactttatcaatggataatgatatcccattggtagtcttcaacttaaacgaaccaaacaatatcaaaaaagttgttgaaggtgccaacatcgggacaacgatcgaaggaggagaataatatggcaaatccaattttagatgaagcaaaagcaagcatggaaaaagcagaagcttcattacaaagaacattaggccaaattcgtgctggtcgcgcgaatgcaagcttggttaaccgcgtgaatgttgagtattacggtgcaatgacaccacttaaccaaatcgccgcaatcacagtcccagaagcacgggtcttgttgattaccccttatgacaagggcgcgcttgaagatatcgaaaaagctctttatacagctgatttagggatttcaccagccaacgatggctcagtaatccgtttagtaattccacaattaactggtgaacggcgtaaggaaattgctaaagaagttggtaaagaagctgaaatcggcaaaattgccatcagaaatgcacgtcgtgatgcaatggacagcttgaaaaaagctgaaaaagcaagcgaaattagtgaagatgaaatgcatgatttagaagaacaagttcaaaaattgacgaatgaagcaacgaagaagattgacgaaatcgccaagaacaaagaaaaagaaatcacagaaggttaatccctaatggatgcaaaaagccccgccactgttgtggcggggctttttttgtgttaatgaataattttactcttcgtcgcttctttgtggagtttttcaaagaatggattgatctgatctttcaagaagagcccaatcaggaagaaaacaaccgcaaagagcgctaggatgataaagttatgccagaggttcggtgcgtaaatcccaccagttggttcgcgtaagagattgaccccgtatgtgaacggtaaaatggggttaataaactggaagaattgatcggagaggacaactgggaagttcccgccaccgccagagatggaaagcaccaagacaatcatcgcaattcctttaccaacgttcccgaacatcgcggcgagaacgtaaacaattgtcatgaagaccatgctcaggaagacggctaataagattagcggtagtttatcaacgatgtaggccttcaataagaaaatattaccaagcgtcacaatcacggcttgggcgacaccaatgacgatgtaggttagccagcgagcaataaattgctgtttcttagtgtactgattcttttgtttgtcgtctaacgcgaagttggttaagacgatgttactcaaaagaagtgcaccaacccagagacaaagggctgtgtagaacggcgcacttgctgagccataggtcttaatcgggtagacgtgtttttctttcagttcaaccggtttggctaagaaattactttccttagttgcatcgcggcgaagcaatttaatcagatctttgagatcgaccgtcttttgttgtttgcgaatcgcctcagcgcctttttggatcccgctacgtaagaatggccaatcattgttgatgaggtcggtcgcatcatttaaggcggttttaacgagtgggaatttctcgttggccatgttgagcgtcgttgttaagtcgttttcgatgcctggtaagtcattgttgatgaaactggttgccagttgcagtttatttttgagtagtgggtaatcattctggtaaacgtcagaagcggtgtttaatccagagataatcgtgcccagattgccatttaataatgtattcgcgtcatgaatttcttgtttcaacgctggtaactgctgagcatatttttgcagatagtcgatggcttgttggagcgtcttttgtgtgttgaataagagtgcggggagtttcgataaaacttcgccgttaagctgtgttaagacggcgttaccgctagcaattaatgttgaaaagcggtcgagcatatttttgacgctgtcaccgatatgggccgcttgaatcttagcgacgctgtcttcgacttggtcggcgtattgaatcaaaccattaatcttggtttgcaaatcgtcaattgataaatcatcgtaatgggcgagaaggtcatcaacttggcctttaaaaacgccgagttgggtcgccaacgtatttaaatgtttaatcggtgtatcaagtgcatgtgattccggttgaccattcgccactgctgactgattgtagctgtcttgcaagttttggagggttgtcgcaagttgagtcgcatgggtttgcaaggtagcggtgtgatcatataagttctggagcgcttctttgagcgcttgcttgagttcagcattattgggatcctctttgagttgactcagcaaactattgacggccgttaaattagttgaaatgttagttgccaattgattggtaatggctaacccttgatccaccgttttttgaatgaccggtaaagcagcttggagtttagggattaagtctgattgtaattgacccgcgacaccttgggccgtttggctaaaagtcattaagtccggtaagactttttgtgttttgtttaacacatctaaaccagtttgagcttcgttaatgccgttcgttaaagtattggcgatgccatcgaaatcagaatcgagtgtggcaacttgtttgccagcactttggatttctggaatcttagcctgaactttcgttgcgagctgaccggctgcttcaacttgtggtaagtattgattgatgccgactactttttgcgccatggcatttgcttgtggtaaaaaggccgcgaactcgttggcttgggcaagctttaatgccatttccggtagtttcttttgtagattaagcacttgttctgcgtattggttaatttctggaatttgttggtctgttttgagaatgaggctcgagaaacgattaatgacggggagatttgtattgagatcaatcccggccttgtttagggtactcatcaatgttttaccaacggttgagacgaattcttctgaaatggtggactgaagcctagttgcacccgcactggtaattttaggcgcaatcgcgttaatcttatcattagatgagtagactatctttggcttttgaatcttgccatcgacgaaactaacgagatcctttgagaagtttttgggcacgtaaatcccggcgtagtatttccccgtttttacgccgtcatctaattcttttttgctcgaagtaaattgccagcctaatttgtcgtttttctttaattggctaattaattcggcgccaatctcgacttttttgtcagcaatgacaacactttgatcggctgagtaaacagcgacttttaagtcttgcgatttactataagggtcccataacgcccagatattaaaccacgcgtagagcgatggaatgataatgagggcaataattaatagaagagcgatcgggcttttgaagattcgatgccaatcaagtcgaaagagttcgaaggtttttcgcataataaactccctttttctgtttaaggtatgtattagtttatcatatttaacctgttacatgccaataactataggaatctactaatatttaacaataaatttcaatgtgatagcggcaacagtacgttgtggcgggaatcgttggtattaaaggctcaatcgtggataaaaatcatctgggaagaacttaaaaagtgcagaatgggcggttcagtttgtacaatgccggtgacaatcggttgattttaaatagtcacttcctgtgatttttggtacaatcatatgagagttattgaaactggaggagtatgtggtgtttacaaataaaaaaacagacgcacaacaactagatcccaccaatatccccaaccacgttgccatcatcatggatggtaatggtcggtgggcgaagaaacgcttaatgccaagaatcgctgggcataaagcaggaatggaaaacgttaagacgattaccaaaacggccagtcgaatgggtgttaaagtcttaacgttgtacgctttttcaactgaaaactggaagcgtccaaatgacgaagtgaacttcttgatgcagttaccggtcgatttttttgatacgttcatgccggaattgattgctgaaaacgtccgcgtgaaagtcatgggtaatattcaagatttaccagaaaagacgcaaaaagcggctaacaatgcgatggccgatacggctgataacacagggatgattttgaactttgcactcaattatgggtcgcgtgacgaaatccaacaagcggttaagcagattgctaaagatgcggtaaatggtacaattgaggtcgatgcaatcgacgatgcgttgattagtgattacttgatgactggctttttaggggaatatgctgacccagaattattgattcggacgagtggcgaagagcgaatttcgaacttcttactctggcaaattgcttacagcgaacttgttttcgtagatgaattctggccagactttaccccagcagtgtttgaacgctcaatcggcgcttaccaaaaacgtaatcgtcgttttggcggtcttaaataggaggaaatacaattatgaaacaacgtgtcattacagcaacaattgctttaatcatctttatccccatcattttctttggtggtatttacattgatatcgcggcagccgttttagcgctcgttgccttatcagaagttttcatcatgcgtaaacgaattattgtctcacctgatgcaaccatcgccggactagcggtgttaagtttagccttacccaaaggcgcctttaactggttaccagcaggtgtgtcacaatttgatttattctacttcttcgttgccattttattagccatcacagtcttcacgaaaaaccgggttagcttcgatgatatgggtgtcacaaccttagccagtctctatatcggcttaggcttccattatttagccgcaacgcgaaatattggtggttttgacactgtgatgtatatcttattggtcatctggatgacagatatcggtgcctacacattcggacggatgtttggtaagaataaaatgtggccagctatcagccccaataaaacttgggaaggttcaattggcgggacattatcagcattagtggtcgcagctatttatttaaacttcttcccacaagcttattcaatgcctgtcatgttaggtttaacgttgatcttctcaattgccggtcaattaggcgatttagtcgaatcaggttacaaacgctattatggcgttaaagactcaggcaaaatcttaccaggtcacggcggcatcttagatcgctttgacagcatgttgttcgtcttaccgctactacacttgtttggcatggtttagagtgcgtttgtggcgtttaacttctgaggatagtctagtcgggcgaatgaccaacttgttggtcgtttgacagacgtagctagacggaagaagttgccaaaaaaagcacgttttaaaataagagtgcgtttggttgcggtcagcaactgagcattaatacaaaaattcgaataatcccggttttaggattatttgaaattttagattaagcggaagttgttgcaaccaaaaagcacgtttttaaaagtcaatattatctagcgtttagcgcaactttttggtttgcgctaaacgcttttcttgtttctaaggaattcgtgatataatataacagttcatatcaaatgagagtattgaaatacgcatttagaagggagtcgtactctattggcggcgattattgcgtttattatcatatttggcattttagtagtggtgcatgaatttggccacttttacatggcgaaacgttctggtattttggtgcgtgaattttcaattggcatgggacccaaattatttgcaacgcgcaaaaatggcacgacttatacgattcgttggttaccacttggcggctatgtccgcatggcggggatggcggatgatgaatctgaaatcgaagccggcacgcaagcaaccttgctgttagacgaacaagaaactgttcaaaaaattaatacaagtgacaaagtaaccacgttaaacggtgtcccatttcaaattgcaaaaactgacttgcaaaaagaattatggattgaaggctatgaaagtggtgacgaatccgaattaaagcgttattcggtcagtcacgatgcaacgattgttgaatcagacggaacggaagtgcaaatcgcacccgtggatgttcaattccagtcggctagtttaatcaatcggatgttgaccaacttcgcaggaccgttcaacaactttatccttgcgattgtggcgtttgcgctctttgcttttttaaacggtggcgtcccacaaaacaaagcgattgttggcacagtgatgccaaactcgccagcacaaaaagccgggcttaaaatggatgaccggttagtgaaagttgctggcaaaaaagtcacgacgtttactgatttcagctcggtgattgcaaaatatccgaataaaccagtgaatgtccaggttaaacgggcaaagcaaactaagtcactcgaaatcacacctaaagcggtgaaagtcgaggggcaaaaggggaaagtcggccaaattggtgtgacagctggactcaaccatagcgtgggggctaagttgaaatatggcttcacccaatcatgggcgaatgcgacccagatttttaaaattctcgggtcattcttaacgggtggtttttcactcaataaactagccggaccagtcggcatgtattcaatgacgacgcaattcgcgagtcaaggctttacaatgctcgtctacttcttagcgttcttatccgtcaacttggggattatgaacctgattccaattccagccctcgatggtggtaagctcgtgatcaacgtgattgaagcgattcgcggtaaacccatctcaccggaaaaagaaggcattgtcacccttgtcggggtcggcatcatggtcgtcttaatggtcttggttacatggaacgatattcaacgctttttcttttagattatttttggaggcataacagattatgaaacagtcaaaattatttatcccaactttaaaggaagtgcctaactcggccgaggctaagagccatcggatgatgttacgggccggctatattcaccaagtatctgctggtgtttacagttacttacctttagcattccgcgtcttggaaaacatccaagccatcatcaaagatgaaatgagcaagattgacgccgttcaaatgcaaatgccagggattttacctgctgaattgtgggaagaatcaggtcgttacgaaacctatggcgataacttattcaagttcaaggaccgtcatggccgcgacttcatcttaggcccaacacacgaagaaactttcgctgacttggtgcgcaatgaaatcaaatcatacaaaaaattaccattaacgttatatcaaatccaaacgaagtatcgtgacgaagatcgtccacgttacggtttattacgcggccgtgaattcatcatgcaagatgcttattcattctcagccaatgaaattgatttggatacaactttccgccaaatgtaccaagcttacaccaacatttttgaacgctgtgggttagacttccgcgcaatcgttggggatgccggtgccatgggtggtaaggattcaatggaattttctgcgattgctgaaattggggaagatacgattgtttattcagaccaaagtgattatgctgccaaccttgaaatggcaacgagtgtccgtcctaagcaaaactcaagtgatgtgcaattagagcttgaaaaagtagcgactggcgatgcccacacaattgaagaagtggctgctaaattagacgtcccagcacaacaaatcatcaagagtgttctctttatcgctgacgaccaaccggtcttggtcttagtgcgtggcgattttgaagttaatgatgtgaagttgaagaacttcttagatgctgatttcttagaaatggcaaccccagaacaagtcttagcaacaatgaacgcaccaatgggttcaatcggaccagttaacgcgccagaagacttacaaatcgttgctgattacagtgtcgaagccatggtgaatgccgtggttggggcgaatgaagccgatcaccatttcacgaatgtcaacagcaagcgcgactttaccgtagctgattattcagacctacgtttcgttcaagaaggcgaaacatcacctgatggtcaagggaacttgcactttacaaaggggattgaaattgggcatatcttcaaactaggcacacgttacactgaacaattcggtgccactttcttagatgaaaatggccgtgcgaaaccaattatcatgggttcttacggaataggtgtgagtcgcctcttatcagcgattacggaacaacaagctgatgaaaacggcttagtttggccaagcgcgattgccccttatgacttgcatgtcgtaccggtcaatgtcaaagatgctgaccaagtcttattagctgaacagatcgaaaacttacttgaagaagcaggttactcagtcttagttgatgatcgtaaagaacgggctggcgttaagtttgccgacagtgacttaatcggcttaccaatccgcatcacagttggtaaaaaagcagcagaagaaatcgtcgaagttaaattacgtaagacgggtgaaaccctagaagtgaagaaggatgaattgattaattcattaggtatcctattggcttcagagacaacagaagctgaatagagtgcgttcaagctcggtcaacttttgagcattagcacagggaagcgaattaacgacgcagtcgataatttgattcccagcgctaagcgcagaaagttagcttgaaaagcacgtttaggaatagagtgcgtttgaaaccgtttggctccaagcattaacttaaattcgtgaatgagcgacaacgtcgatcggtcgcggattgtagttaagcgcaagaggcagtttcaaaaagcgcgtttacattataaatgttcggacatctaaaaagggctgagacagaatgatatttgtcctagccccttttatttaactttctgaatatgaggaggcccttttgtggcattagatcaaaccgcactgtttcaaaaattattagaacaaattgatttacccgcggatgttgcgaattatcctggcttcaaaactggccaagtagaacaagtcgttgtccacgaaacatccaaacggtggacttttaaattacatttcgaatccgttttgccatatgctgtttacacaacgtttgaacagtatctagaagcagccttcaaatcaattgcggatatcgcggtcgacatttcgaccgatgcaactgaattggacggcggcgttttagcagcttattgggaatacgtcatcaaccatagtgggattcaatcttcaatgttgcacgaattgtgtgaaaaagagaccccctatatcgatggtcgcaacgtctttttagttgtcgaaaacgacatcgtgaagacgttcttcttaaatcaagcgcaaacgacaatccaagctggttatcaacggcttggttttcccaagtttgcgattcaacccttgattgacgaatccgcctcacaaaaggcaatcgaagattttcaagcgaagaaggctgaacaagatgcagcccgcgcacaagcggcagccgaagcgatcaagaaaaatgaagcactcaaagaaaaacgtcaatcagaaggcaaaccagtcgatggcccgatttcaatgggccgcggcttaaatcctgctgaaccaacccgtcagatgattacaatcaatgaagaagaacgttccgttgtcattgaagggtttgtctttgataaagaagtccgcgttttacgttctggccgccagctcttaatcttgaagatgacggattactcatcatcatttacggtcaagaaattctcccgggataacggcgacgaaagtatcttcgcagccatcgataaaggcatgtggttcaaggtgcgcgggagtgttcaagaagataacttcatgcgcgatctcgtggtcaatgccaatgatttggtcgaagttagccatcccaaacgccaagataccgctgaaaatggcaagcgcgtggaattgcacttgcataccaatatgtcacaaatggatgcgaccaacaagattggcgacttcgttcaacaagccgctaaatggggccaatccgcgattgcggtgaccgatcattataacttacaagctttcccggatgcttatgcagcagggaagaagaacggcgttaagattttgtacggtgtcgaagtcaatttagtcaacgatggtacaccagtcgcgtataacttgcgcgatgaagcactcgaccacgctgaatacgtgattttcgatgtggaaacgaccggattgtcggctgtttacgattcgattatcgaattggccgctgtcaaaatgaaagatggcgaagtgattggctcgttcgatgaatttattgatcccggtcacccgctatcagctttcaccacgcaattgacgagtatcaccaatgaaatggtgcacggtgctaagaaagaagccgaagtcctagcgttgttcaaagaattcgcgggcgatgccgtcttagctgggcataacgtaacgtttgatatgggctttatcaatgctggctatggtcgtaacgacctcggtcagattgaaaatcccgtcatcgatacgttggaagtttctcggatgcttcatccagaatacaaaaatcataaactcgatacgttaaccaagcggtataaaattaacttggaacatcatcatcgtgctaacgccgatgctgaatcaaccggttatttgttatacaaattagaaaccgaagcggccgagatgtatgggatggtcaacgtcaatcaactgaatgatcgcgttgggattggcgatgcgtataaacaagcacggccagcgcatgcgattttaatggcgcaaacccaagctgggttgaagaacttatttaaactggtttcagcatcgatgaccgaatactattaccgcacgccgcgtttaccaaagagtcgcttggatgccttacgtgaaggcattctagtcggttcagcttgtgccagcggtgaagtcttcgaagcgatgatgcaaaaaggctaccaagaagcacgcgatcgcgcgaagtattacgattacctcgaagtaatgccaaaagccgtttacgcaccattattagaacgtgaattagttcgcgataatcgggcgcttgaagaaatcattcgcaacatggtcaaactcggtgctgaattggataaaccagtggttgcaactggggatacccattatttgaatccagaagattcaatctatcggaagattttgattcactcaatgggtggggctaatccattgaaccggtcacaattaccggatgttcatttccgatcaaccgatgaaatgttgacagcgttcgattttcttggtgccgatattgcccaagaactggttgttacgaatccgaaccaaattgccgatatgattgatgaaatcacaccggtcaaagataagttgtacacgccgaagatggcgggtgccgaagatgaaattcaaaccttaacgatgaatcgtgcgcatgaattatacggggatgaactccctgaaatcgtgcaggcccgccttgataaggaattgaagagtatcatcgggaacggtttctccgttatctacctgatttcgcaaaagctcgtgtataagagtggtaaggatgggtacttggttggttcccgggggtccgttggatcaagtttagtcgcaacgatgaccgggattaccgaagttaatccattgccgccacattatcgctgtcccaactgtcattactccgaattttataccaaaggggaagtcggttcgggttacgatttagccgataaggactgccctgaatgtgggacaccactggataaagacggccatgatattccatttgaaaccttccttggcttccacggggataaagtgcccgatattgatttgaacttctccggtgattatcaaccggttgcgcataactatacgaaagtcttgttcggggaaaataacgtgttccgcgctgggacgatcgggacggttgctgataaaactgcctacggctatgtcaaagcctacgaacgtgataccgaacaaactttccgcggcgcagaagtcgatcgtcttgccaaaggctcaacaggcgttaaacgaacgaccggtcaacatccggccggcatcattgttgtgccggattacatggacatctatgatttcacaccaatccaattcccagctgacgatcaagatgcagcctggaagacaacccattttgatttccattcgatccatgataatatcttaaaactcgatatcctgggccatgatgatccgaccatgatccggatgctgcaagatttatcggggattgatcccaagacgattccaaccgatgatcctggtgtgatggccttgttctccggcactgattcactcggggtaacgccagaacagattaattcgaaaatgggcacgctcggtataccagaattcgggacgcggtttgtccgcggaatgctcgaagaaacgcaccccacgacgttctcagaattactgcaaatttctggtctttctcatggaaccgacgtgtggttgggtaatgccgaagaactgattaacaaaggcgttgtcaccctaaaagacgttatcggttgtcgtgataacatcatgatggatttaattcactggggtatggatgatagcatgtcgtttaacatcatggaacgggttcgtaagggtaaagggattccggatgactggcaacaagccatgcgcgacaacgaaaatgtgccagactggtacatcgattcctgcctaaaaattaagtacatgttccccaaggcccatgcgaccgcctatattctaatggcgttgcggattgcttacttcaaagtttacttcccaattatctattactgtgcttacttcagtgtgcgtgccgaagatttcgacctcgtggccatggcccaaggtaaagaaggcgtcaaggcccgcatgaaggaaatcaccgataaagggatggaagccagcgccaaggaaaagaatttgttgacggttctcgaaatcgccaacgaatgtttggaacgcgggattaacatcaagatggtcgacatcgaaaaatcagattcatctgacttcttgatccaagacgaccacaccttgcttgcgccattccgcgccgtcccaagtttgggcggtaacgtcgccaaacaaatcgtctccgcccgcgaagaaaagccattcttatccaaagaagacttatccaaccgtgggaaagtttccaagacactgatcgaatacctaacagaaaataacgtattgaatgacctgcctgatgaaaatcaattgtcgttgtttgatatgatgtaaataaaatagcccgcctagattgtgaatgcaatttgggcgggctattttaatgtgattgaataaatagtataattttcacaagcaaactatttcgggggattttaatgaaaaagttagataatgttatagtaagttcaaactttgaagataatagtaatttttttaaactaagcgcaaattcgttgtttaattttatgaaacaatatgaatatttagaatatgctattgagcatatggcatttcaaccaaggtattatccggagaatatagagtatttaaatttaaatcaacgaggtattgctcttttggagtggtatattccgatgagctgtttctgcgatataccattgcatcaaatcgcagttcatactgaggcgtatggaaagtttggcataggattaaacaagaattttggtataaaaaagggtatccagcctatccaatatttaaacaataaatccgtccaggtgcaagaactatcaaaattagtgaatagtttactcgaatctgcaagtgatgaattagagaataatgctgcagcagattatataattgattatttaacttatgttaaaccaataactggaaaaatgaaaaaaagtgcaactagtgacgatgaaataaaaaagaattttcatgatgaacatgagtggcgatatgtaccaatattagaaacgggtgagctaccatcaatgttagtagatgaagatgaaattatggctgagaagacttccaatatttattctaattcaattactcagtctaaaaagggtatgcttaattttgatgtagatgatattagatatatttttgtcgataatattactaatcgagatagattaattaagtttattcgttcaaaaaagagtggaaaacgaatttccaaaactgataaagatgtattaatatctaaaattattgtttatagtgaattagctgaggattggtgaataaaatggggaaatttaattcagtttttaataagggaaatgtagttggacacaataaaatagcaatccaaaaatatcttaatcaggatgcgccaaaaggatataaatataaagaaatttcaccaaatatgtttgctctcacaccaaaagataatgagaatgaagtttcatttactgttagaataaaatttccatttgagtttgaagggttacacgttacgagtattgatgagttattggatgctatgcatagaacgcagaaaccgtataaggttgattcgcaacttcaaatgaaagagccaccgttaattaagctattaaatagtgaaataagaaatcagtttttgatgcctaccaagtttcaaaaagcaggttccgttgaggtggagtggggtgatcaaaagagggagcttaaattaaaaagggtaccgtatgcaagttatgaggagtctaaatttgaactagcaaatccagaaattttaaatattgtattattaattaatgaagtgaaatcatcattaaaaataaaggctagtttagattttaataagttaaaatctcttaatgattattttgagcaccaaggtttaatcgaagccttttataaacggaagttaaaaatattaggtaaggaaactggaacgatttctgaagaatatactgtttttgagaagaataatcgattttatgaagtactcaaattattacaggagaaatttaatttggagtttaaatttcctcatgaaataaaaaactcggaattttttaatattaaaatattatatgaaagcctcataaataatagacctgtacggatggaatcagataaaacatatcgatttaagtttgataaagaaaaaacaaatgtgaagaaaactaaatacttagttggtaaagatcagagtatttttgctgatatttcactggaattaacgttacttcataagaaaataagagttattaagtatgttctatatactcatttaataatgaaagaagtaatcatcgaaacaaatgaggccgtatttgaatctggtgatagtaatgaggtttattatttctatgatatggttgatgagccggtgtttgatggaaataagatgggaatgatgaagaaagatgcaattgagtataaagaaatagattttaatgattagtaaagaagccaatagtattaaagaaattctattaatcgggaaataatgaaaactaaatatttgacaaattatagttttttggatattgaatgttttcaatatttgatataatttggaatatctaatattaaataaaaagatcaattagatgtgtttacatattatgtatagaaaaagccattttcaaataaatttgactttttctatacagactggaggattcgttaatgtctgtcaaaccgttaacattcaaagagagtatgagtaaaaatgtgcaagcgattatgcctcaagaagatgaaaaattggtatttgaaaaaaacctagtacaatttctcgaaaatattcaggcaaagtatgatgaatcagaagagtatcaaaaaaacatcatttcagattttttaaaggttttacttcctaaaaattttattaacactagtaaaagaattgatctcgctatttatagtggtcaagatagttcaagttcaatcggagtcattattgaaactaaacgtttaaataatcttaacgaaatgatgactacttctaaatttaattcaaaagcttttcaagaggtagtggcctattacctccaggagcgaattacttctaaaaatttagaggttaagaaagcgattattactaatggactatcatggttcacaatcgaagctagagagcttgaaaagtatttttacaataataaaaaacttcgtattctatatgaaaagtggcagcttaatcagctttctgattcaagtacagattttctttataccaatgtcatcaaacctgagatagataaagctattgagaagggaatcgcgattgcacactttgatttaaaagatacaataaaatcagctagtccaataagaattaagaaaagcaaattaactcaactttatcgttttttttcagcagaaaatctattaaataaagaaatatttacagatcccaaattgcaagaacaaattagccacacgataaatcctattaaatcagtattttcattaatattcatattttatggacttaacttaaccggcggaagcagcggagaaaagctctttgggtgtttgatagccagtttgccggcgcggtaaattgtttagctttgactcaactgcttggatatcatgaggacccaaaatatccatggatagacccttgggtacatcgcggcggatcattcgattatgcgcttcgttagtcccacgctcagaggaacgatatggatgggcataataaaggtcagcgacaccggtaagtacagcgccaacttccgagaactcagcgccattatcggcagtaactgacttcatgattgatccgtattcttgacagatcttggccagctcatagttgactgaatcggcatcacgaccatcgatcaaacgtagaatttggcagcgggattgacgctcgatcagcgttaagatcacactctcttgaccgttgcgcttgcccaccacggtgtccaattcgaaatggccgaactcttggcgctggtcgatacttttaggccgttcatcaatactccgtccggccagacgcttgtgcttgatcgagtgatgatgtttagcacggtggcgcgttttttcgagtagatcaagattacggacttcaagtaactgggcatcaatatagtggtatagcgtcttggtcgagaccatctcctcaggttgatataagccttcaagtttggcccgtcctactgctgcatcaggcgaccaaccatcttgacgcaaatgagtcgtaaaatagtcgataaaatcagcgacaccgacgagtttcaaaggtcgatgacagtgggctcgattagcttcgtacttagcttgtgctgtttctggtgagtatacagcgtaatattggcgttgaccattcactttttttacttggtcgatctcgccgcggcacaattcattattgattgtttgatgacaaacattaagcgctctggcaattgcacgattggaatagccttggctgtgcagcgtagcaattctgcctcgttcaaacgaagttaggtgctgacctttttttctgactgtggtattctgttcttgcatcaagacaataacctctttcattgtttgtgtaggaacatcaatgataacagagatttgtcttggtgttttttattttatcaattagctaaaagtatttggctaacttgattataaaacgcgcgaatatttacagattctaataaacttaataaatctttctatgatgaacttttatatataatggggttggaagaagccaaagaaggtactaccaaagttatcaaacgattaaagtcggaaaagagacaatatgcttcacttgttgaatctataattagtagattacaacaaaatgatgtgcctgaagataagcaatatgacaatgctattcagctagcggtggtttggattaatagaattttatttttgaaattacttgaatctcagttggttgctttcaatgatgatgcaaattataaatttttaacttatgaaaaaataaaatcctatggtgatttaagtgatttattttttggaattcttgcaaagcgacatgaccaacgtgattcacgtttagaagaaaaatttggctatatcccatatttaaacagttctttatttgaggagagtgatcttgaacgaagtcgagatggtattactattgaccagttacgtgaggaaaatatagatatttatagtaaaactatattaaaggggcccgacaaaaaacgtaaaataggaaaaatggattttcatgagtatctttttgaatttttgaatgcttatgatttctcaacaactattacacataaagaaaactctaaaaatgaactaataaacgcttccgtgttgggtcttatttttgagaaaataaatggttatgcggatggtgcattctttacaccagggaaaattactatgtatatgtcacgacgtgcacttcaaatgactgtagttgataaagtaaatcaagaactagattgggatactcaaacgattgaggatatcaagtttaagattaggaatattgagacagctagaaaagtaagtaatatcatcgatcagcttaaaatatgtgatcctgctgttggatcgggacatttcttggtttcgatacttaatgagattattgcacttaaaaatgagttgaattgtctttttgatgcagaggggaatatcttaaatgatattcatacttatgtggcgaatgatgaacttattgtacaagatttttcggggaataatttttcatattatgcaaaaagtgggccatctactcgaattcaaaaagctttatttgtccaaaagcagaatatcattgaaaattctttatttggagttgatataaaccctaactcagcaaatatttgtcgcctaagactgtggatagaattactaaaaaactcgtattatgatgagtcaggtgagctagttacattgccaaatatcgatattaatattaaagttggtgatagcttactgcataaatttgattttaattttagctttgatatgagaaaaaatgattttaaagaatatctagaattagttaaggaatacaaaaatactaataataagcgaactaaagcggatatttttcagaaaatcacaaaaattaaaagttcatttgatgatactgctacaagtccagaattaaaacgtcttaaaaagctagaaagagaactcgaagatttagctcaaatgaaccttttcgctaatggtaaggacgaacaaagacgatttgacgaagttagtaaacaacgtttggaagctcaaaaggaatttgataaagctatgcaaaatccaatgttcgcaaagggattggagtggcgaatggagtttcctgaagttctggatgaggacggaaattttacaggatttgatttaattattggaaatccaccttatatttttgcccgaaatcagtcatttagtgaggagatgaaaaaatattaccgttctacttataaagtaagtgaatatcaagctaatacctatacaatttttatcgaacttgcttataaactgatgcgaaaaggtggtagttttagttatattgttcctaataatcttttgacgattcaaacaaattcaaaaattcgagaatttattacaaaaaaaacgagcgatattgtattgattaactccttagataaaatctttacggatgcaagcgtcgataattgtattattttcttcaagaagaataaacctaactggatagaagtatctgagttgaaaaatggtgagtttaatcagattggaaaagttgacgctggattttttggagaaaatccaatgttcagtttttcaatggttaaatataaaacagctgttaatgcttattataagatagatagttttgataaattggataggccaggaatcgcaacagttaaggcaggtataaaagcttatgaaacggggaaaggtaagcccaaaatgtctgctcaggataaaaagaagcgaatctatcactcaaaatcacaaatcgacgaaacttatcataaatatttagatggtgaaaatgtaagtcggtattgcttaacatggaatggcgagtttataaaatacggtgaaaatcttgctgcgatgagaactcctcaactattcgaaaatccaagaattttagtgcgtcagattccaacttataaggtttatgcaattgaggcggtttatactgagaatgatgagattaatgatttaaattctgtaataattactgatattcaagtaaatccgttctttttacttggtgtgattaattctaagccaatgacactttggttcatgatgaaatttgataagttccaaaggagagtctttccgcaatttaaagttaacgagcttggagaattcccaattccaaatataacaagtgaaaaacaaaaccgaattggagttcttgctcaaaggattagcactgagatggaaaaagaagttagtgataaaattttaattactaaacttaatttagaaattgatgaagctgttatgacagcctttgagttaagtgaagaagaaaaggcggctattagaacttttgaggtatagatattgatgaagatttcttcagtgaagatgattaatgcgtatcttcgtgcaacacactgcaaaatataggtgacactgatcactttaattcctttcttctataatataatcattaaccgcttgccagatttatgcgatttgtaggtagattgtaaaattaatccgaacgctgttcggacaaaaaagatcagcttcctttaaaatggtgtttaccacaaacccatcttttaggagctgatcttttgtctagtataacctattccgaacgaattaaaatcgaaaccttttgtgaactagggctgtccaatatccaaatgggcgttcggctgaaccgatcaccgtcaacaatttcttatgaattatctcgatgtcaaccttatcaggctgaattagcacaaacagatgccgaatacaagcgatcacgatgtggtcggaaaactaagctgagcgatgagttaaagcaaaaaattctcaaccatttacgtctaagctggtcaccaggaatgattgctcacgaatttaaactagctactaaatctatttataattggctaaatcaggggagaattggtttctccttgaatgatctacctgaacatggcgtacgccaacggcgtaacgttgaccaacgatccaaatataatcaatctttggggcgatcaattgaacagcgtcccatgatgattaatcaacgtaagcgcatcggcgattttgaactagatacagtcgttggtcctcgtgggcatagtaaggcagttttattaactttaatcgatcgcaaatcacggttcctttgggcataccggttaaaagatcggacgacagcgactgttaatgaagcactaactaagttcctaaccacttttaatggtccggtgcacagctttactgtggaccgtggcactgagtttagtgggctagtatcacttgaatcacaatatggtattaagacctattactgccatgcttatactccagctgaacgtggtagtaatgaacgctttaatcggaatttacgttatttttatcctaaagggactcgttttgagcacattagtgctcaagatttaacgacgacgttactccaaattaaccagcgaccgcttaaaatactcgactggcaaacaccgtatcaggttatgctgacaaatttgtccaaaaattcggattaaatttgcaatctacctgtatatgacaattcgattgacaacgagaagtattatagagtgggatttggtagcaagaactaagaggaggcggttcacatgatggttagtcataatcctaaaattcagattcaagatatgtctaagcaatctgttaatcaatataggtcgcaggggaagcatttgaatcaggctgatatcgccttaatcaaaaagaacggtgaaaaattacttttagtaatccagaagttttaaaaacgattaaaaaattagcttttgaatagattaataaggtttttcaaaaatagacgctgaaattggcttttctaccaataatcagcgtctatttttttagtttagtttcttaatatcttctccatcgtctttcctttagccaattcatccaccaacttatcgagccagcgaattttttgcatcagtgggtcttcaatggcttcaacgcggacgccgcaaaccacgccggtgattagattacagtttgggttcatctgcggtgcttcttcgaagaacgtttggtaggtgatgtcttttgagagttgggtttcgagttcagtttgggtgtagccggttagccagcagataatctgattgacttcggcttgggtgcgctttttgcgttcggctttttggacgagcattgggtagattttattgagggacatgttgaagatgctggttctgggcatagtgggggcctcctaatttgtaaatggtttagtttacatcagtcgatgttctaggttggtggcggtgaagtcgcctttgtcgtagcggtggcgcgtttgtgagtattcaaacggggtgccgttgtcgaggtagacgacttggtcgacttctaggacggggtcggtgctggcgcagtcgatgtatttttgatcgtaggcatcggatttatcggcgcgaatccggcggactgaggggccgatcgttaaaccgagttgtttagtgatgtggctgtagattgatgatttgaggatccttttattaatgccgggaatcacgcaaatcggcatgatcgtatattccagcatgagcggtgtcccgtcgagcattcttaaacgaataatatcatagacagaatcatttttaccgattcttagcttgagttgttccgtttcatcggggaagcgaacttcaaatgaaatcagtttgctttcaatcgtaccaaactgcgcgtaatgtttggtgagccccatgtagtcttgcacggcattgtcatagagtgaaaattgttcagtgacaaaggtgccaacgccttttttaccgtagatcacaccttcaatttgtagtaaatcgagtgctttttgaattgtcacgcgactggtggcgtactgggttgcaagttcggtttgaattggtaattggtcgccttgttggtagtcgccgcggatgatttgattgcgaatgtcgtttgcgattgattgatattgagccatggcaacctccttttttaaagtcatcataattcagaatcgatagtatgtaaaccaattggttatcaaagtcgctgaataacgatgagtcaggattccatttggcgcgataatcggttacagtgaagatgtaatcgattacaagataatcagaggtgactgaaaatgacagacaaacaatttttctggggcaactcagtttccagcatgcaaacggaaggcggctggaatgaagacggtaagagtttatcggtttatgatatccgtgaagcgagtgaatatgcgagtgattggcattttgccaatgataattatcaccattacacggaagatttcgactacatgcaagcgatggggatgaatatgtatcgtttccagatttcatggtcgcgggtggttaatgatggagatggcagtttcaatgaagctggaattcagtattatgatcggttaatcgatgccttgttagcgcgcggaatcgaaccgatgatttgtttgtaccactttgatatgccgttgcatttggcagaagaatacaatggtttgatgaataagcacgtgttagatgcgtttattcgttttggcaaagagatggttgatcggttcgcggagaaggtcaagtattggatttcgttcaatgaacagaatctctatcatcaaccggaagctttcagaattagtggttatttaaagggtgaccaaaccacggcggaattgtatcagattgcgcataatgtgatggttgcccacgcgacgatttgtaattacatccatgaaacaactgatgcaaaaatcgggggaatgctggcgtatagtgaagtttatcccgctactagtcaaccggccgatattttagcggcgcgcaagtgggatgaattcattaactttacgttactcgactgttatgcgaaggggcagtattcacacgaaatgctgacgtttatcaaaaacgcacagatcgatatgcatattttgccgggtgaattggaaacgattcgtcaaatgacaagtgacttcataagctttagttattatgcttcgacgaccattaatgcggcgaagattccagcggggactgccccaaatgattatcttaaatttggtgggcagaagaatccctacattgatgccacagaatggggttggcagattgatccgctcggtttccgcgacgtattgaataagttgtaccaacggtatcggttaccagtcttcccaattgaaaatgggattggtgttcaagaagaatgggatggtcagaatccaattcaagacgattatcggattgagtaccatcaagcccatattgatgcaatgtttgatgcgatgcacgaagacggcgttgaagtccttgggtatcttggttggggcttaattgatattttgagttcacaaggtgacatgcgcaaacggtacggcatggtctatgtcaaccgcacgaatcatgatttgaaggacatgcaacgtgtgccgaagaagagtttttattggtttaaagacttgattgctaagtatcggtgttaaatgttttttaaaaggagtggggttttcgccactcttttttatttacctatttcatttcaaacttattcttgttataatcgataccagttgtccgtgttataatacagcggactaaatgttataacagaggagagtacagatgagtattggcgatattttaacgaagacgtttacgaacatggatattgtgagttcgatcacgtcgacagtgtttattattttattaggattctactgccgcaaacgcgagatcttcacggataaatttgggaagattctgtcaaaagtcgttttaacggttgctttaccagctttggcattcaactcattcatgcaagatattaatgggaagactttaaaagaaggcatcaacgttttagtttggggcttcttgatctatattattttaattttaatttcaaaaccgttatacttacgttttaagggtgatcaacaagatacattacgcgtgttgaccatctttggttcaacaacgttcttcgggattccaattgttggggcagttttcggagctaaaggggttatgtatagctcaattttcaacattggttatcgcgtgttcttatactcatatgggtacatcaagatgagtggcttgaagatggaatcgaagaacttgaaaaacatgttcttaaatccaattgtgatcgccacatttgcggggttaatcatctggttaatccaaggcgcattaccacaagtggcggttgctgggcattcagtggccttcttacgaattgatcaaacagcgccatggttgttcaaaccaatgacgtacttagctggtttatgttcaccattagcttggttagcaattgggacaacacttggcgaaatcagtttcaaagaagctgcttcggacaagacatcatggatttatagtattaacaaagtgattttagtacctgctttaaatatcgtgttattggccatcttaacaatgactcacattttaccagtcagctacatcagtttggcaacgattgtcatcatgatggcaacgccaacggcaacggtcgccgctgcttacgcgattagttttgacaaggatgcggtcttggcatcgaacgcgtcattattatcaacggtcttagctgttgtgatgacgccagtctggttagtgattttagaagtgatcaaccaaatcgggattttctaggaagagggaaattaaatgtttaaaattgcttgttacggcgttcgtccgaatgaagtggcgacgttcaataaatataacaactacgattatgatttaacgttaattgaagacttattgactcacgacaatatcgaaacggcaaaaggccacgatgcggtcttgttacgtgccaactgtgccgctgatgcgcaaaacttagcgaagttgaatgaatacgggattcgttacgtatttacccggacagtcggttacggtcatatcgatttggccgcagcaggcaagtacaacatggaagtggcgcgcgtgccagcctactcgccaaatgcgattgctgaattggcattgacgctagggatgtcattattgcggcacaccacttacacaacgaatcggacagcccatcatgatttccgtgtgagcccagtgatgttcagtaaagaagtccgcaactgtacggttgggattatcgggacgggcaagattggctacaccgaagcgaagttgtacaaaggcttaggtgctaaggttgtggggtatgatttatatccatcagaaatcgctaaggaagtgcttgattttgtcagcttggatgaattattagcccaaagtgacattgtcagcttgcacattccatacttcgctggtcaaaacgaccaattcatcaatgcagacttaatcgcaaagatgaagaacgatgcaatcttggtgaatacagcccgcggtcaattgcaagataaccgtgcgattatcgatgctttgaaagctgatcaacttggtgcattcgccgctgacgtgttaccagctgaaggcgaaatcttcttcaagcaattcccagcagaccaacctgttccagatgcaaccactcaagaattgattgatttatacccccgcgtcttgttgacaccacacgttggttcaaatactgacgaagcgctcaagaacatggtcgagattagttttgaaaacttccatgaaatcttgacgacgggtaagacgcaaaatagcgtcgcaaccactgaaaattaaagcggttgtttgtattttcatgaaaaatatggtatattgttatcagtaattagatacttcagagcgagtgagcagaaatgctcactctttttattggagcacgtctaatctgaaatataaaaatgaattggagggaatcatttgagtaccgttgtggaaacagttcacgatctgatcgtgccgattcttgatcaacaccattttgaattagtggacattgaatttgttaaagaaggtagcagttggtatctgcgcgtcttcattgacaaaccaaatggcattgaccttgaagattgtgccttagtaaacgatgcgttaagtgagaaactggattcaatcgacccggatccaattccgcaggcttatttcttagatgtttcatcacctggtgcagagcgtcctttaaagaaggaagccgatttccaaaaagcacttggcgaatacattcatatctcgttataccaagctgttgatggcgagaaaatctatcaaggtacactaaaagcccttgatgatgacactttaactttagtgattaaaattaaaacgcgtcaaaaagaagtaacgtttaatcgtaaggaaattgccaaagctcgcttagcaattgaattttagtaaaggtaggctagttacatgagcaaggaaatgttaggtgcacttgatgcgctagaacaagaaaaaggcgttaaaaaagagattgttattgaagcccttgaagcagcacttgtttctgcttataagcggaattacggtcaagcacaaaacgtggaagttgaattcgatcaaaagaagggtaacatccacgtctatgctgtcaaagaagtcactgaagaagtgtttgattcacggcttgaagtgagctaccaagatgctttggcaattaacaaggcatacgaagtgggcgatacaattcgttttgaagtcacaccaaaagacttcggccgaattgcagcccaaactgctaaacaagtgattatgcaacgggttcgtgaagctgaaagaagtatcatttacaatgaatacagtcaatacgaaaacgaaattatgcaaggggtcgttgaacgccgcgataacaagttcatctatgtcaacttaggcaagatcgaagctgttttaagcaagcaagaccaaattccaaacgaggaataccaagcacatgatcggattaaggtttacgtttcaaaagtggaaaacacaactaaaggcccacaagtctttgttagtcggacacaccctgatttagtgaaacgtttattcgaacaagaagttccagaaatttatgacggcaccgttgaaattgtctcaatcgctcgcgaagctggcgatcggacaaagatggctgttcgttcaacagaccccaacgtcgacccagtcggcacctgtgttgggcctaagggacaacgggttcaactagttgttaatgaattacacggcgaaaacatggacattgtgaagtgggaagaagatccttcagactacatcgccaatgccttgaatcctgccgaagtcatcgctgttcaatttaacggtgatagcgaacatacatgtacagtcatcgtccctgattatcaattgtcattggcaattggtaaaaaaggtcaaaatgcacggttagctgcgaagctaacgggctacaagattgacatcaaacctgaatctgaagtcgaattcgttgatgaagatgacagtcaagatgaaggtgcagtcgttgaaggttttgaagaagaaacaacagaagctgttgaaggcttcgaagaccaagcaacggattctgctgttgattctgaagaacaaccacaagaataagtgaggtgttcatgatgaaacaaagaaaagtaccaatgagaaaagacgttatttcgcaagaaatgaagcctaaaaaagaaatggtgcggattgtaaagactgccgaaggtgagattagtattgacccaactggtaagaaatcaggtcgtggcgcttatgtttcactagaacctgatgcaatcaagaccgcccaaagcaagaaaattttagaaaagacgtttgggattgacgttgcagaatcattttatacagaattattcgaatatgttgatcatcaaaaggctcggctagaattatttggagaacgaaaatgagtgaacaaccagaccgtttattacaactcttaggtatttgcatgagagcacggcaactggtcagtggtgaagaacaagtcctaaaagccattcagcagcaaaaagcgaaattggtttttatcggctcagacattagccaactgacacagaagaaattgactgacaagagtcatttctacgaaatcccggaaacaaaagcgtataccgcggcccagctaacccaagcaattggattacatagagccaccatcgcggttgttgatgccgggtttgccaaaaagatgataacgctactgggataataaaggagcgtgaagatatgggtaaaaaacgtatctatgaattagcaaaagaaattaacgttgccagcaaagatcttttagaaactgccgttaaaaaaggttacgatctaaaaaatcacatggcaactatcgatgacaatcaagaaaaagctttgagagccatcttccataaggaaacaaaaccagctgcaacgacaactgacagcaagccagccgcagcacctgctgcaccaaaggcaagcgaaaaaacagataacggtaagattaagattaacaaagccgctatccgtcgtcgtccagaagctagcagcaaaccagcacctcgttcaaacaaccaacgcccacaaggcaaccggaatggccaagcatcaaatggtcaaaaccgcaacaatgccaatggtcgtcctaacaacaataacgcccgtcctaataatggtcgccctaacaataatgcggctaaccggacaaacggcaatacgcgtccagctgggtcaaaccaaccattgagcttgcaagaacaaatctcacaagctaatgcacgtcgtcaaagaacgcaagaacgcattcaacaacaacgtgaacaacgcgaagcagacgaaaagaaacgccgtcaacaaagtaaccgcccacggccagctgctaaaccaaacggtaataacagcagtcgtccagccggcaacaagccagccggcgcacgcccaacgacaacaaataatcgtcctgcaaacagcaataataacggccgtccagcaaacaatacaaacagccgtcctaataacaactcgaaccaaagtcggccagtttcggcacaagaaatgcaacaaaaaatgcaagctaatacggtgagtgctgctaaaccagcatcaaacaatacagcaagcaagccaaagaactttggtccagataagaaacgtggcggcgggtataacagctacggtaacaatcaacaacgtttcaataagaaacgtaagaagacccgtaagcaacaattagctgaacaaaatgctgctaagaaggaaatgccacaacgtaaagaacggccattaccagaagtattagtttactctgaaggcatgaacgttgcggacatcgctaagaagattcaccgtgaaccagctgaaattatcaagaagttattcatgttagggattatggttaacatgaaccaatcacttgataaggatacaatcgaattattagcaacggattacggcatcgaagcagaacaaaaagtggaagtggatattgctgatatcgattcagtatttgaaacagaagctaagagtgatgccaaccttgtgagccgtccaccagttgtcacaatcatgggtcacgttgatcatggtaagacaaccttattggataacttacgtaacagtcacgtgactgatggtgaagccggtgggattacgcaacatatcggtgcttaccaaacgaagttaaacgatcgtttaatcacattcttagatacacctggacatgcggccttcagtaacatgcgtgcgcgtggtgctgatatcactgatatcatcatcttagttgttgctgctgatgacggtgtgatgccacaaacaatcgaagccatcaaccatgccaaggctgctaaagccccaatcatcgttgcggtgaataagattgataaaccaggcgcaaacccagatcacgtcatggaacaattgatgggttacggccttgttcctgaagactggggtggcgataccatctttgttaagatctcagctaagactggtgaaaacattgatgaattacttgaaatggtgcttcttgaagccgacgtgcttgaattgaaggctaacccagatcaaaaagcagttgggacagttatcgaagcccgtcttgataagggtaaaggacctgttgcatcactcttgatccaacaagggacattgaagattggtgatccagtcgttgttgggaatacctttggtcgtgtccgtgtcatgacaaatgatcgcggtcgtcgtgtgaaggaagtcttcccatcagaaccagttgaaattactgggttaaatgatgtgccacaagcagctgaccgttttgttgtctttgaagacgaaaaaacagctcgtgctgctggtgaagaacgtgccaaacgtgcgctcttgaaggaacgtagtcgttcaaaccctgtcacattagataacttgttcgaaactatgaaacaaggcgaattaaaagaagttggcgttattatcaaagccgacgtacaaggttcaacagaagccttggctggtagtttacggaagattgaagtcgaaggcgtgcgcgtgaatattattcatgaagccgttggtgcgattaacgaaagtgacgtcacattagctgctgcaagtaacgccatcatcatcgggttcaatgttcgcccaacaccacaagctaagattcaagccgatgctgaacaagttgatattcgtttacaccgaatcatctacaaggcaatcgaagaaatcgaagctgctatgaagggtatgttagaaccagtttacgaagaaaaagtaacgggtcaattaactgttcgtgaaacatacaatgtttctaagatcgggacaattgccggttgtatcgttgacactggcgttatccaacgtgatagtggtgtccgcttaattcgtgacggtatcgtgatttatgaaggtaaactttcaagcttgaaacgtttcaaagatgacgttaaagaagtcaaaactggctttgaatgtggtgtgacaatcgaagattacaatgatattaagattgatgatcaaattgaagcctacgtgatggaagaagtacctgttaaataattaatttacaggaggacaagcaatgaaacatcgtgttggtcgggttgaacaagaaattcaacgcgaaataaatgacatattattaaaaagagtgcgtgatccccgagttgaaggggtcacaatcactgatattaatctcagtggtgacttacaacatgttaaagtttattacagcattttatctggcttagcaagtgacgctgaaaagacacaagctggcttagataaagctaaaggattgattcgcagcgaacttggccaacggattaagttgtacaagattccagaaatcacttttgaacaagacggttcagtgcgttatggtgaacatatcgacgaacttttacgtaagttacacgaagatgaagcacagcgttaaactgtgaaaaagagccccgcgaaagcggggctctttttttgtttgaatgaccttatggaaacgataatctattaaattgacttagtcatttgcaccatattactattctttcaaaagttgattaaatatcgaccgttaaaatatatcgtccaacgctatcggcggcgaattgttaagcgttatacagaggccttatcagtatctaatcgctggttgcagttttattattatcaacgagaaatatcccacattattccacagattctttattatttagaggctaacccggcattagaaacgattgatgatgcgattgcttatattgatagtcagccggttagtttagagctgtatcaaaataacttaagcgagtttcgtaaatatgttaagcagtttaatacaatggtgctgagtacagcgaacgaactgggacaaccggctagtcgacagattaattttgtcacgcttgatgggataccgaatgtctggtattttggcaccgaccccgaagcgccgaaagtcagtgaactcgatttggggcgagccgcaatttttacgctaccgactagtgaagaattgtgaatcacgagtaaccggctcaaggtataccgaactcagtatcgttttagtgatatagcagaggcctatcaaaaacaagtaccaggctatgttgagagtttatccaaagaagaacaggaaaaagagattatttttgcgatcgaattaaaaagtgctaggatcgatagtcggtttcaaaataaaggactcactttttctgagtaaaaaaggttactaataaaacaacattgagcgaggatgggcaagagtttcttttgtcccatctttttttgtgctttgataataaattgagcagcatcataaagctaatcccgttcgacttcacactctatgctataatagtttagttaatacttaaaggagattacttatggacggcattgtacccttatataaagaacgcggcatgacgagtaacgattgtgtgtttaaagtgcgccgcattttacacatgaagaaagtgggccattctggcacgttggatcccaacgtcgatggggtgttaccaatctgtatcggtcaagcaacgaaggttgttgatcaattggtgcattctggtaaagtctacacgggtgaaatcacccttggcttatcaacaacgactgaagacttagatggtgaagtcgttgaagaggcgcgcttaacagaacctttttcaactgagagaatcaaagagaccctcgctagttttctgggcgattcaattcagattccccccatgttttcagcggtgaaagtcaatgggcggcgtttatacgactatgcgcgcgctggtgatccagtcgaacggccacaacgttcaatcacgattacgcagtttgatttggatggtgaaccacaatttgacgcagaatctgggcgccaaacattccggttcattgtcggttgctcaaaggggacttatatccgcacattagctgttgatttcggtcgtaaactcggtttacccgcagtgatgtccgatttgacacgtcttaagagtggcggcattcaaattggtaactgtatcacgttggaacaattggcgcaaaaagctgaagcgggcgaactggcagacgttttattgccaattgaccatgtatttgaagattacaagaagattgctttagacgacgatcaatgggccaagcttttaaacggtgtgttcttgacattgccagaacaaaccgatgagattgtggcgttgacctatcaagggcatatcaaggcgctctatcaagttgaaaaagcagcgcaacatctttatcgcccttataaaatgtatttacaaaatcaagggactcattaaaaaaaactaggtgaaaaatatgcgtgtcattgaattaattcatccatattcaaaagaacaagtgccagctgaccaagtggtcttggcgcttggcttttttgatggcgtacatcgaggccatcaagctgtaattcggaaagcaaaacaaattgcagttcaaaaaggtttactattagctgtgatgacgtttgatatccatcctgccattgtttatcgcaatgccgatcgggagtcattccgttatttatcaacggttgagcgcaagcaagaattgatggcggagttaggcgttgatgttttctacatcgtgcactttaatgaagcatttgcacaactagccccacaaacatttgtcgatcaatacttagtcgctttacatgcggatacagtggtggctggctttgattacacttatggtaaaaaagagattgcgaatatgacgacattgtcagactatgccaaagggcgctttgccattgtgacagttgcagaacatgaccataatggtgtcaaaatcggctcgacattagtacgagaggatttagatgctggtaagattgcggaagctaatgaattactcggttatgtttaccaaacgaccggtgaagtagtgcatggtgaagcacgcgggcgagaattagggtttccaactgctaacatcgaatcgcaacgaccagaacgattaccaggaattgggatttatgcggtccgctttttagtgcgcggtcaatggtatattggcatggcttcaattggtcggaatgtgacgttccacagcaataacccggtaacggtggagattaacttattagatttcaatggcgatatttacggtgaacaagtgaaagtggattggtatcactacttacgcggcgaagtgaagtttgactccgcggaagccttgattgaccaactccaccaagacgaagccgatacccgaacttattttgagaaattagaggcacaacattaatggcaggcgcttatattcacatcccattttgcgagcatatttgttactactgcgatttcaataaggttttcattgaaggtcaaccggtcgatgattatgtcgatatgttgattcgcgagtttcaattagtgatggcagaatacccagacgaaccaattgatacgatctatgtcggtggggggacaccaactactttatcaccagcacaactccaacgtttaaccgatgggattcatcaatacttaccttatgagggtggtgagtttacgtttgaagccaatcctaatgacttacaagatactgaaaaattgcaagttctgaaggacaacggcgtcaaccggttaagtattggcgtgcagtcgtttaatgatcagattttaaaacagatcgggcggattcaccgaagtgcggatgtttatcgggcaatcgataacgcgcgcaaggtcggcttcgaaaatatgagtatcgatttgattttccgcttaccacaacaaagtgaagcggatttcatggatagtttgaataaggcaattgaactcgacttaccgcattattcgacgtactcattgattctcgaacgcaaaacaatcttctataacttgatgcgccaaggcaagttgcatttaccatcgcaagatgttgaagcacatatgtatcaagccgcgattgatagtttcaagcgggctggcttagatcaatatgaaatcagtaattttgccaagccaggctttcaatctgcgcataatctaacttactggcgcaatgaaaagtattttggctttggtgccggtgcttacggctatttaggtaaggatcgttaccataacttcggcccaatccaacaatacctagaacccttaaaagaaaataaggtgccagtcattgaacgccatgttctgccactgaccgaacaaatggaggaagaactcttcctcgggttacggacgatgcaaggcgtatccatcagtcattttcaagataaattcaattatccattacaaaatgtttacggcgaaacagttgccacccaaattgcaaagggctacctcaaacaagaaggcgattggttaagactaactgaatcaggtaagttcttaggcaatgaagtcttccaagagtttctgctagatagttattgagtgcgttcaaaccggggatattctgagcattcgccttgtgtcgctaggcacaggaatatggtttgaaaagcacgttataaatattccacttcataaagcgagtctcttccatctaagaagcggctcgttttttattttgtcctttggtccagtaaggccctccgtctaaggaccgattttcagtaaatccgtaaaaaagccggtacgtttcttgactttatttgacgttcttgctatattaataattgtaattagcactcatgatattcaagtgctaaaaagaggtgatgacatgctgaccgaaaggcaattaatgattttgaaagaaattattcgtctttttacagagagtggtcagccagtgggttctaagaagttaatggcagaattgccggtacacgttagttctgcaacaattcgtaatgatatggctgatttggaaagtgtcggtttaattgagaagacgcattcgtcatctggacgggtaccgtcgatgcaaggctatcgctactatctagaccatctcatgcaaccagcaaccctcaatccggttgatgtggcaacggtccaacaatcatttggacagcactatcataagattgatgaaatcgtctcacaatcggctaatatcttatcgaacctaacgagctatacagcaatcgcgttaggaccggaagtggctgagattcggttaactggttttcgtctagtaccgttgagtaatcaccaagtgatggcgattatcgtgacgagtgcagggacagttgataatcaggtatttaccattccacaagcgatttcgggtgatgaactcgaaaaagccattcgaatcattaatgatcacctaattggcttaccgttaaccgtggttagtcagaagttaaagacggatgtaccggcgctattagcccagtacatggcttctccgaccggctttttagacatcttcgacgatgttttgaaaaaggcgagtcaagagcgcttatttgttggcggtcagatgaacttgttgaatttttcagagttctccgatgtcacccagctgaagtcgttgtataacatgattaatcgttcagatgatttagccaagttgctagatttgtcccctggaggcgccaatagccaagttcaggttcgcctgggcaccgagatggccaacgatctgttgaaacattatagtctaatgactgttaattatgacgttggtgaacacggacagggagtcattgcactactgggccccactagcatgccctattcgcggatgattgggttactcgatttattccgtgaagagttagcgaagaaattaattgattattatgcgaatttcgatgatgatcaatcttaaaaggagcgtgtttgtttgaccaagcaagaaaaggctgagaaacaagaaaagccagcagcagaaatgccagaaacagaaacacctaaagaagaaacgccatttgaacctgaattagaagcagatgaagtgatcgaagatgctgcacctgacgaagatgcagctaagccagatttagcggctcaacttgctgaactccaaaagaaatatgatgatttagaagatagtttcttacggtcacaagctgaaattaaaaacattcaaacccgtcatcaaaaagaacaagctagcttgttaaaatatgatgggcaatcacttgcaaaagatgtcttacccgttttggataatctagaacgtgcgttggcaactgaagcaactgatgatagtgctgagagtcttaaaaagggtgttcaaatgacatacgatcatatgaaacatgctttagaagatcatggcgttaaggaaattgaggcgcaaggacaagcctttgatccgaccattcatcaggccgtgcaaacggtcgctgttgatggtgatcaaaaagcggatactgttgtacaagtcttccaaaaaggctactacttgaaggaccgcgtcttaagaccagcaatggtcgttgttgcacaataaattaaactaaaaatctaaaaaaagagggtattttttatgagtaaagtaatcggtattgacttagggacaaccaactcagctgttgccgtattagaaggcggacaaccaaaaattatcacaaatccagaaggcgcacggacaacaccatctgttgtgtcatttaaaaacggcgaaatccaagttggtgaagtggcaaaacgccaagcaatcactaaccctgatacaatcgcatcaatcaaacgtcacatcggcgaagcaggttacaaagtaactgttggcgataaatcatatacaccacaagaagtttcagcaatgatcttacaatacatcaagaaattcgctgaagattatcttggtgaagaagtcacagaagctgttatcacagtacctgcttacttcaatgattcacaacgccaagccactaaagatgctggtaagattgccggcttagatgttaaacggattatcaacgaaccaacagcttcagcattagcttacggtttggacaagacagaaacagacgaaaaagtcttagtttatgaccttggtggtgggactttcgacgtttctgttcttgaattaggcgacggtgtcttccaagtattatcaacaaacggtgatacacatttaggtggggatgactttgatgaagccatcatgaactggttagttgaaaacttcaaatcagacaacggtatcgacttgtcaaaagacaagatggctatgcaacgtctaaaagatgctgctgaaaaagctaaaaaagatttatctggtgtgacaagcacccaaatcagcttgccatttatctcagccggcgaaaacggtcctttacatttggaaatgactttatcacgtgctgaattcgataagttaacatcagacttagttgaccggacaaaagcacctgttatgaacgctttgaaagatgctggtctagaatcaggcgacatcgacaaagtcatcttaaacggtggttcaacacgaattcctgctgttcaagaagctgttaagaactggacaggcaaggaacctgatcactcaatcaaccctgacgaagctgttgctcttggtgctgctgttcaaggtggtgttatctcaggtgacgttaaagacgttgttttacttgatgtgacaccattatcattagggattgaaacaatgggcggtgtcttcacgaagttaatcgaccggaacacaacaattcctacaagcaaagcccaaacattctcaacagctgccgacaaccaacctgccgtagacatccatgtcttacaaggtgaacgtccaatggctgctgataacaagactttaggtcgtttccaattaacagatattcctgctgcacctcgtggtgtgccacaaatcgaagttaaattcgatattgataagaacgggattgttaatgtttctgctaaagaccttggcacaaataaagaacaaaaaatcactatcaagagtaactctggtttatcagacgaagaaatcgatcgcatgatgaaagaagctcaagaaaatgaagaagccgacaacaaacgtaaagaagaagttgatttgaagaacgatgttgatcaattaatcttccaaacagataagactttgaaagaacttgaaggtaaagtttctgacgaagaattacaaaaggctaaagatgctaaagaagaattagtcaaagcacaacaagaaaacaactttgaagacatgaagacaaaacgcgatgcgttgagtgaaatcgttcaagaattaacagttaagttatatcaacaagcgcaagaagcacaacaagctgctggtgctgaaggtaatgcaactgacggtaagtctgacgatggtactgttgacggcgacttcgaagaagttaaagacgacaaataataatgcgttttaaaaaaagccaaaacctagtatggtctagggccttggctttttttaatcagtcaattatgctatccttgataagatagatttaacgcgtaagtatatgaatggaggcccacaatggctgataaaagagattactatgacgtcttagggataagtaaagacgcctcagatgatgagattaaaaaggcctatcgtaaactttcaaagaagtaccatccagatattaacaaagccccagatgcagaagccaagttcaaggaagtcacagaagcgtatgaagcattaagtgacccacaaaaacgggcagcttatgaccaatacggtcatgctggtatgaacggtggtttcggcggcggcgcaggccaaggcttcggtggcggctttggtggtgctgaaggcttcggcggtttcgaagatatctttagttcattcttcggtggcggcggtgctcggcaacaaccaaacgctcctcgtcaaggttcagatttacaatatcggatggatttgaagttcgatgaagccattttcggcaaagaaaccaagatttcttataaccgtgaatcagaatgtcacacgtgtcatggctctggtgctaaaccaggaacaagcgcccaaacgtgtcacaaatgtcacggtgcaggtcaagtccaagttgaacgacaaacagctttcggccgcatgatggctcaagaagtctgtgatgtctgtggcgggactggtaaagaaattaaagacaagtgtgaaacatgtcatggaacaggtcacgaagatgaacggcatactgttaaggttaaagtgccagcaggtgttgaagatggtcaacaaatgcgtcttcaaggccaaggtgaagccggcacaaacggtggcccttatggcgatttattcatcgtcttccgcgtggcaccaagtgctgaattcaagcgcgatggcgcacaaatttattcagaagtcccaattagctttgtccaagctgctttaggggatgaaattgaagtcaacacagtccatggtcctgttaaactaaaagtgccagcggggactcaaacgaatactgtcttccgtctacgtggtaagggtgcgcctaagctccacggtacaggtaatggggatcaaaacgttacagttaacatcgtgacaccaaagaccctcaacagtaaacaacgtgatgcgctaaaagcatttgcagtcgcaagtggtgactcacttaacccacaagacaacaacttgttcgacaagattctgaacaagaaacacaaaaaatagaagtgcgtcaaaagtggttatcctgtgaggattagcctaacagggcgaatgattgctgtaagcaatcgtttgacttgtgtagctaaccggaataggatgcttttgaaagcacgttaaaaatagaagtgcgttcaagccggttatactttgaggactagcctagtttcgtgaatgagcgacggagttgatcgtttgcgggacgtagctagccgcagaagtatggtttgaaaagcacgttaaaaatagaagtgcgttcaagccggttatactttgaggactagcctagtttcgtgaatgagcgacggagtcgatcgtttgcgggacgtagctagccgcagaagtatggtttgaaaagcacgttaaaaatagaagtgcgttcaagccggttatactttgaggactagcctagtttcgtgaatgagcgacggagtcgatcgtttgcgggacgtagctagccgcagaagtatggtttgaaaagcacgttaaagcccctctaatccacaagattagagggctttttttgttggagtggataggtgggagatttttgaaaaattctgttataatggcggtaataaattaggacggaaggtgagttgcatggatgacaaagacaaattagaacttgaaattgcacgccttaagatggaaaatgagaatttacggttgaaagctgaggttgaacagcggaagaataataagtactggttgtgggcattagtgccaattatcgcgattcttgctggcaacatgacctcattttcacggatgttcatgcatttttgtagatagttcacgatagattgcatagaaataggcgttaagcagattatgaaaactgcttaacgcctattttttattggcgactgtgacggtagccgtaactgaagtaaattgttaggccaatcaccaaccagattaagaagacaatccaagttgttagttgtaactgggtcatgagtagtaagcataagccgcatgaaagtaaaggaatccatgggaatagtggcactttaaacccttgtggcaattcattataaaatggtaacttgcgcaggaggatcacaccgagagaaacagttgcaaaggcgaataacgtgccaatgttgaccaattcagcaatcttatcaagtggcactaccattgcgacgatgcttgtgacgatggcgaaaatccatgtattcgcaactggcacatgtgtttttgaactgactttggcaaaaacgggtggcaatagcccatcgcgactaatggcgaagatcagacgtgttccgccgtaggtcataacgagtaggacagttgtcataccggcaactgctcccagggcaacaatcccagcaacccagttttgatgcatcaattgaagcgcaaaagcaacggggtcaccaacgttgagttttgtatagtgcacgacgccaacgaggacggtggcaactgcggcatacaataatgaagcaatcaataatgaagcgataatcccgattggcatatcacgttgcggattgacaacttcttctgatgcggttgaaacggcatcaaagccgatgtaggcgtaaaatgctaatgctgccccagaaagaatgccaccagcaccaaatggtaagaacggtttgaagttggctggtttcacatagaaaatggcaacgccaaggaaaattacgatgacagcgactttcacaccaaccataatcgtattaatccgtgttgattcgcgtaagccatttgatagtaagaacccaatcaataacgtaattaaaccggcaattaaattaataccactagggtggccaggcgtccatgcagtcgataagaaggtaggtaagtgtaatccaaagccagcaattagattttggaagtaggctgaccaactgacggccactgaggcgactgcgaagagatattcggaaataagtgcccaacctagaatccacgcgattaattcaccgaagacggtgtagacgtatgtgtaggcactaccggccaagggaattgtagaagcgaattctgaataacaaagggcagccattgcgcagacgactgcagcgagcaggtaagacagcatcgcaccgggtccagcatatttagcggcgataatccctggtgtgataaaaataccggcgccgacgactgcaccaacccccatggcggttaaaccaaaggcggttaaatggcgttctagtgtactgtttttaaattggttcacgtcgatttgttttttggcaaagagtgaatgttgtgtcattagtaactcctttttaagtgagatggttctaattttaatcggtctactgagaagtgtcaagataaaaaaagcgccatgacagtgattgagccgtcatggcgcggattagttaagtgattaaattaagccccagtggcgtaaaccttcaataatgccaccttcagtattcttagaagtaatgtatttagccttggctttagcttccggaataccattgcccataacggtgggatagtctacgaagtcgagcattggtaagtcgtttgtaccatcgccaaacgcataagttgggatgtccgttaagttttgtgagcgaatcaattctttaataccggtttgttttgaacaatctttttcaaccgtatcaattgagttcggtgtgttgcggtagaatgttaagtcggtacttagtgtttctgtataggccttgtcattgtcgtttgttagaatcaacatcatgtagactggatgattcaagtaatagtctggatcaacttcggggacgggggcgttgacaaacttgtaggcatctttgccgggttgagttacagccgtaatccggattgcttcttcattataaaaagcgatggcttcgtcagcagcattagcaattgcgacggttttttcaatcacgggcgttggaatagtgcctttataaacaggttgaccttcatattgaatgaagctcccatttaaacaaatgaatgaatcgatgccggtttttgcaagtgcatcttgaatttcaagcggtgagcgaccggtcgcaatgattggtaggtagttgttggcgcgtaattggtggagtgcaatcgcaacagctgcatctacttcagaatgttcgttgtaaagtgtaccgtcaaggtcgaaaaatactagtcctttataagtcaaaatggggcctcctaaataatgatatctgcttaacatgctatcatgcttagcgataccatgcaaacgggaaccgtgatgcgtttgattttcatcacttcttcatatattattcatccgtaattggtttatctactgtataatatagacatagcaacgtaaaaagagaaggaattctaatgaaaattttaatggtagaagataacaaatccgtatcagaaatgatgagtatgtttttccaaaaagaagcttgggatgcccatttcgcttacgacggcaatgaagcagtggaagcctttagtgtcgatccagagagttgggacattatcacgcttgatttaaatttaccgggtttagacggaatgcaagtcgcccaaaaaatccgcgagttgtcgaagacagtaccaattattatgttgacggcgcgcgattctgaaagtgatcaagtgcttggccttgaactcggtgctgatgattatgtgacaaaaccctttagtccaatcacactgattgcacggattaaagccttacatcgccgtgctgagttgattgatgaacaagtcgaagcagctgaagaaaacttacaacaagcggctgaaaattcagattttgatgtacaaacaacacactttaagttgagttctaaaacgcgtgagacttatttattggacaaaccaattttagatttaacgccaaaagaattcgatttattgaagacgttagctaaaaatccccgtcaagttttctcacgggaacaattattagaacttgtgtgggattaccaatacttcggtgacgaacgaacagttgatgcgcatatcaagaagttacgtcaaaagattgaaaaagtaggaccacaagtgattcagaccgtttggggtgtcggttataaatttgatgattcagacgcagcgcgcgaatgaagcttatttatcaatggatgttggcatttttcggcgtcattatgacgaccattattattgtggggattgcgtttacgcaatattcgacaaggaccgcttatgagagcacctgggatcaactagaaggttacgcggatgtgattgaacgtgaagctttcaaacaggggtctcaagcggccttgtcgacccaattcattattgatagtcaacaaatcctttcccaacaacacgttgggtttaatttctttaacgccgaaaacgagatggtgtatcctaccccggatcctaaagtttcggtcaagaaacaatattggaaacatttaaagaatggccagattcaacggctgagcttaagtcgtgattcgcaccaagtgaataacaataagcaagaacagttagtggtcttcaaacccgttttttacaataacaaactgatttacgtgattggggtggcagcaccactacaaaccgttaaatctggtttgacaacgatgcgcaagaacctcttgattgcctttttactatcgacaatcggtgggattctgttgagttacgtcttagcacggtatcaaatttatcggattaatcgcttacgaaatgcgacccacctagttgctgaaggagattttaatgttcagattaagaatcctggtaaagatgaattggatgatttggccaccgattttaatgagatggtgcattcgttgaatgaatctgaagaggaaattaagcggcaagaagatcgccggcggcaattcatggccgacgctgctcacgaaatgcggacgcctttaacgaccgttaagggtctgttagaagggttgcaatatgatgcgattccagaagagatgcgcgccaagagtatttcattaatgcaaaatgaaaccaaccgactcattcgcttagtcaacgagaacctggattatgaaaagattcggactaaccaaattaaattgaacccgcaaacgtttaatgcggtggaagctatccagaatattcaagagcaactcgagaagaaggcgactgaagccggtgatacgctcatcttggacgcccaagagaatgtcccaatctatgccgactatgaccgttttgtccaagtgatgtttaacatcatgcaaaatgccattcagtttacagaaaatgggcaaattacggtgactgcggaagctggtttccacgaaacaatcttaacgattagcgataccggtatcggaatgacggacgaacaagtcaaaaatatttgggaacggtattacaaagcagatccatcacgtaagaataccaaatatggtgaatctggtttagggttggcgattgtccaccaactcgtccagttacattatgggacgattgaggtccaaagtattcctgaacaagggaccacttttaccttaactttcccagatgaaacgattgtgacaagtgaaagctaaaccaatttaaataggcgtcacgacaaggattaaattgtcgtgacgcctattttttagattaaatatgcaattgcgtttgagctggttgggtttcactgatgatttcgccagcgtgcattgagagggtaacagcggcgcgcttgttgagagcctcgtagaagttgtcgctatccattagaatcaggtgggcgggtttacccacttcgagaccatattggtcaaggacgtgcattgcacgagcaccattgtaagtaatgaagcgataggcattcatgatttcagtatggcccatgatttgggttgccagtaggccactatacaacacatcaagcatgttgccatcgcccattgggtaccatggatcttgaatatcatcttcaccaaaagcgacgtttagcccgttggcagtcagttcttttacgcgcgtcaaaccacggcgcttcggataagtgtcaaaacggccaccgagaaataggttgacaagtgggttggcgatgaagtttaaatccgccatttttaacagccgcatcaatttgtacatataggcatcgttgtaacagcccatggcagttgtgtgtgaagccgtcactttgtctttcatccccgtttcaagggcgagagtcgcgactgtttcaagactacgtgaattgggatcatcaatttcatcggtatgtgcgtcgaatagtaaatcatattcttgagcgagttcaaaagcaaacttcaaggattcgacggcatattcgcgattaaattcgaaatgtggaatagcaccgattgcatcaacccctaattgggcagctttggtcattaatgctttgccatttggaaaagaaagaatcccttcttgaggaaaggctaccagttgcaacgtcatccaatccttgacttcttcgcgaacctcgattaaggctttgagcgcaactaagtctggatcagtcacgtcaacgtgtgagcggacgaattgaatcccatggctggcctgtaattttagtgcttgaattgcgcggtgtttgacgtcgtcgtgggttaaatcctttttgcgttcggaccaaatccgaatgccatcaaacaaggttccagattcattccattcaggctggccggcggtgagagttgaatcgagatggacgtgaggatcaacaaatggcggtaatgccaattgaccatgtccgtcgatgacttgctcattaggatgcggtattagctgtgcctcaattgctgtaatgatcccgttttcaattctgattgactgcaatgattcttgattctcaatgtgcacgttttgaatgagcattttatccaacctcgctttttttattagtgagtataacaatcatgagttgactttggcaagtaagtttaatacaatgcttataaatataaatccttttaagggcagtccagtgaggctgacaaaggagcggttaacaagtacattagtggacctgctctgtctaggagtaggtctttttttaatgcaattaaccaagtggagggtatcaaaatgacaaagcaacaaacaattcatgcagtatccaaggacgcacgaacgatgggcagttgggatttgttcgcaacttggattggtgcaaatgcgaataacggcacttggtttatcggcggcattattgcggcaactggcttgattcaagggtctacgttgttactagttgttggctgtttatcgtacgtcttgcttgcactggcctcctacatggggtatcaaactggtgtgggggcgatggggctaacgcgggcctcatttggcgtgaagggatccgtcttgccatcgattatcaatgtggtacaattcatcggttgggctgcggtgaatacgtatattgcagcaacttcagtgagcttcatcatcaaggaaatcatgggctggtcaggcaacgatgcagccactaaccggatgagcttgattgttgggattctaattatgtctgtcctgcatttaatcagtatttcgctcggtgaaaaatccgtccgctggattgaacgaattggcatcatcttagtgattatcttagtcacttgggaatcaatcattgtcttcaaaatagtaccgttcaaagacttagtggcgtggcgaccagccagcaacttgcggcttgaatttgggaaggcggtcgatatcctagcagcgtttaaccttgcatgggtaaccgctgctgcggacttcagtcgtttttcaaagaacaagaaagcagccacaggctattcattcttaggcgccaatattggcctgttctggtttgctttcatcgggttaacggcgacaattgccacagcgattacgttaaatcattttgacccgaacaacgcggatccaagcaccattgcggccaaattagggttaggtgttttagcgttattagtgatcgtgattaccagtacgacagctaatgcggtgaatctaatggctgcgggatcggctttaaccaatatttttccgaaatttaaattaacgccggcattgtgggtcgtgacgttattggcaacggtgatgacctttatcccggtctatgttgcctcatttttaaccactttcgaaaccttccttgatagtattgggatgttcttaggacctgaaatcgcagttttcttggtggattacttcattattagacggcggcactacaatgttggtgcgctcaatgaagttgctggaccatactggtacaccaaaggatatcatctgacagccatgattgcatgggtcattggggtggtcagctacttggtcttaaatcaattcgcgattattcacgcttatacgggggcaacgtttatcgcaatggggctgacagcacttgtttattggttaatgattcaaagaaaagaaaagacaatttaagggaactaaaaaaacgtcttaattaaggcgttttttttaatttttaccacagagttcatataattttcatactttagttttacactatctttattaggaggtgggtcatgttcttcattaaatcaattccagctaatattcggtattatttacgccaatctttgttaatctatctcgtggattgcctctttttaggcgtcatgctgattgcgctgagcttgatcagtttagaacgacatgacctcaaccagttgaaaaagcaattagccaactttaacacaactaaagaggggactaaccccctgacacatctggttcaaagtaaagaagtcttactgggacgctatcaatttatcgcggtagtgctgactatcgttatcgcacttgtgattggtattttgacttggcaagcgtttaagaagatgcgtcaggatatcgatactttcactagtgcgaattggtcgcgacatacaattgtcaattattatacgttaacggcgctttgcttactaatcagcgcaagcgtgacagtgattttaggttggttattagtcaattcctactattggcgcggattagagctgattaatcaacagtggctacaaaagccgttgcgaccaatacaaggtccccgagcatttcaaccgttatttaaaaatcatctgactgactttagtagtcattcgttattgaatccgattttgcatgagagcaccaagcagaatttaaccaatcaagtattcgcccaactatgggcaccatttatcagtctaattgcaccagtctacattattggttggtgccaagttactcgctttaggaaaatgagaaaggcgtgattgaaatgctaaataaacaacccttagcacttggacaggtctattttagtcaaccggagatgattcagcagagccttgcatcacctgaacccccatatgtcattgattatgaggcgcctaagattctaccctttatgtccggttgggataacttgttgcttcctaaaaagcagcttgcaccaacgttaaaaatgttgattgaacagcatttaaagcgcagtcggagtttattgggcaccgaattaccgccagtcgatcagttctggattcaattgattcgcggtttagcaagccaccagcaactcgtggtggtcaagcatctcttagatgaacttccaccaacggatgctcgccaattattaaatgatgtcagagcggtagcagcgcagtttcaaattatcgtaatcatgacaacgactcaggaatccgtttttaatagttttcaatcgcaggtgattagctaacgtcaaaaaaacgcaaggacaatatatgttgtccttgcgttttttttgacgattattccgtatcgctagttgctgttgcatcagactcttttttcagggcctttgattttggcacttccgtgaggcttgattgatcacccgctaattctggagcatcggttttaaagagcccaacagtcgattgatcaccattttgcgagaataaactggttgaattagcccctaatttattttgaatatcgacaagctgttgatagccagtcagatagttataatcggcagggttcactggtttaaaactttgtggtgtatagaaacgtaataggttcttttcgttaactgaatccgacaaactcaattcgtggttcacttgtttctgccaagcagcgacttgtttttgcaacctagctgttggttcagttacttctgtcccatcctgattattgtagatggtgccatcgagtactgtgtaatcaggggtgacaaagttatggtttcggaaagccacgacttgatcatgttgtggtgataataaatcggtgccgaattggacgtaatttttattatcaatcccgagtaagtgaagcattgttggtaacgcatcgatttcgccaccatattgtttttggataccgccttttaaaccgttcatgtgaatcatgtaaggcacacgctgtagttgggcgttatcgtagtcggtccacgtttctgggtcgcggcctagtacactgagtaaggccttattatcagaattcgaaagaccgtagtgatcaccatagaggacaatcattgaattatcatagagcccagaggctttaagataattgaagaactcttctagggattggtcaagataatgggcggtcgcaaaatagttgttgaccgctgtattatcagttgtggcacgggggaagtcaccgtctttttcgggtaatgggaatggaaaatggttggtgacggtgatgaatttcgtgtagaacggctgttgtagctgttcgagatacttaatcgattcaccgaataataatttgtccttcaagccgtattgtaagacgttatcaggatcggtgttaaagtaggaagaatcgaagaagtagttgtagccgaagttcttgtagacgttattgcggttccagaaggtgcccacattaccatggaaaacggcactcgtatagtcaccgctttgcttgaggattgatggggcagcttggaaggtgttatccgaaccaagcgttgtaaagactgagccttgtggtagaccgtagacgccggtttccatcatgttttcggcatcactggttttaccttggccaacttgatggaagaagttttcaaaacctaatgtattttgatcatgatagaggctatttaaaaatggcgttacttcgcggccttcgaacttaaagtcgattaggaattgttgaaaactctctaaatgaatgacaatgacgttcttgcccttggcaacgcctgcgtattcagcgttcggtgcagcgtaatgctctttcataaagtcgagcaccggatctaagtcgtaactctcagcttgggcacgcacttgattattctgagtagtcttgaaagcatcgtagacggtgaaggtgtcgatgccgaggtacttaacgatgtagttccgatcaaacgtccgtgataaaatttgaggtcggctgatttcacttaagccaaggttgatgccaaataataagacggccagtgaggtaatactgaaggcccaccaccgattaaatgcgtgtttgtcgatcttgatgaccttggttaaaatcagcaaggctaagacaataatatcaatccaatacagcgcatcatgccagttcatgagggccagtgaacttttgctgagcccagctgaaacttttgaataccctaagatggtgttgatggtcatgtaatcggtgaattgccggtaatagatgacattaaaatataaaagagcggtgttggcggcatagataatcaagcccaaccaataactgagatgcggctggcgaacataaagaatgatgccgaataaaaggagcgtcgtcgcgaccggattaaagattaaaatagcaatttgtaagaagccactagctgcgaggttaaaatcggtgaagtacccgaataacgtttttagccaaaataaaaagactaacaaactcatgaagcctaatctcgtggataggaatgatttaatttttgtgagtttcaaataatgtgacatcctttcaaaaaacagaactaaaagagcgctaatgccttattttaacccgagggcggcattagcgcaaatagcagtttaaagtttaaacagaaacttaacgtttcgcgggccgcatgatggcatcgtactttggattcagttgatctggcgccaaaacatgttgataaacggcttgtaattcatggccgatttctgtaatactcttagactgcgcagtttggtagccttgagctgttaaatcgggaacggcattagtgaccatcgcttggatgagttgactgaattctgcgttagtgtggcccatgtagcagttttgttgatcggcaagccagccatggtaaaccggaatatcgcgcaccaacactttttgatgacttgcaagggcttctaagacgacaatcccttcagtctcttcataagaagggaagaaaaataagtcagcattggcatacgcgccttcgataatatcgcctttgatataaccagggaagatgacgttgtcgggatgatcctgtttgacaatccggcgaatattggctggaatactgtacatgggtacatctccaaaccagataaaggtgtattcgggtagacctttggcgatttcgacaaaatcgagaagccctttgcgtttaaagaagaggccgacgcagataatcactttttgatcaggctttaaatggaagaaattccgaaaagcagcttctttagctggtgtggcttgatacttagctaaatcaatgccgtttgaaatgggagcgatagggttggttagaccatagctttccaataatgattttgaataaggggtgggggtaattaagtggtcggcttgttgatagaggctaacgaggtaccgtttaacaaatggagcgagttgattggaaccaacaaaggagttgcgaaaatcttcttcggtcgaatgtgcatgataaatgacgggtttccccattttacgcgcctttttgatgacactgcggcttttgagtccgtatgtattgatatgtaagatatcgtaatcttgatcattcggatcaagcgtatagtcaatccccattttggttaacgcgcgtttttgatgatccaacgcccgcccaattccagatttagcgagtagtttttcactttcaaaatataatagaactttcataaaaggctcctgtttcaatttatagtaacttctattatagcatagcacagtaggcacacatcgggctaaagttgggcagtcgatacctaatagtttaagattcactttagtcgagtaattaagcgttatttattgaaaaaaaacagctataatggacttaattactcattgaataatgaacagataggttaaattagtggaataagtgaggttggttttttggtatttcttgggcgtatttatgaacaatggatcctcccttggggggaacagtataatcatttaccactcatcaaattgacggtggagagtttagataagacgattttgtattgtttggtttttattgtgtgccggttggggtacttattaatgaaacgacgcaaaatacagcttctcccagaactgaaactattgttatttgtgttttatattgccttattggtctcattaacggttttacggcatatttattatccgtggcaaatgcagctccatttgcaacgaccacttagccaaattaatttgacaccgtttgttgagactttcaagttacggcaagcgcccgcccagattgattattggtataacttctacgggaacattgcgtggtttatcccgtttggtttattgcgacggtcattgacacagcgcaaaggggattggttgattacgattattgaaggggctctgttatccctgtgtattgaatccgcccagtttgttttagggactggcatggcagatattgatgatctcatgtttaatacattaggggtgatgattggcgtcctgttatatcaagtcctacaacatgcaaagcgaaaacattaaggttatcaacggtaagaaaacgcttatcgttgatttttttactaaaaaaaacgcttttttacgtaaaatttacgtaagcgcaatcacgactgggacagttgcttacatgacggtagtgaaggctggtaacgattgaatggtgccgttttcctactagccagcggatataaaactatgtataatggattcttgtactttagagaagaagaggaatttataaatggctattttaattgcattaatccctgcacttgcatggggtagtatcgggttagtgagtggcaaacttggcgggaatgcctatcaacaaaccttaggaatgacaattggtgcgctggtttttggaatcggtacctttttagtattacaacccgctttaaacttacggattatggtaatcggtatcatttctggtttattctggagcattggtcaaggacaacagttccaatcaatgcaagcgatgggtgtttctaagacagtcccattatcaaccgggatgcaactgattgtaaacactttagcaggtgctttgttattccatgaatggaagacaacgcacgattacatcttcgggattactgcattagtgatcttaatcgctggtgccacattaacttcaatgaaggatccgaagagcagtgttgctgctaaagaagatacacaatttgcacgtggttttagagcattaatcttatcaacaatcggttatggtggttacacaatcatcgttaactggtcacacattggcgcaacatcaattgttttaccacaagcaattgggatgttcgtcggtgctgcaatttttgccggtgttggcattgggacagcagtcttcaataagaaaacagcactcaacattagtactggtttattatggggtcttgggaacttatttatgttgatttcaatgaatgatattggtctagcaattagctattcattatcacaatgtggcattatcatctcaacaatcggtagtatttacctattgggtgaacaaaaaacgaaaaaagaaatggtttacgtcacacttggctgtttattagtcattgtcggtggggtcaccctcggtatgatgaagtaagcaacttactaataagtcacctagacaaattgtctgggtggcttattttgtttagagtgtgtattattctatagaaaaggcaaaagaagtgagtcagatgaagagaacaaataaaacagctgtcagttactatttattgagtgtgctagttcccatgttattaatggtggggctatatgcaatgctccaaattgtgccgtttggacggcataatttattgattagtgatctcggtacccaatatatgccctttttggcagagtttaaacggcaaatggcccagatgaatttcagtacgtattcattttcactttcactgggtggcgatatattaccgctagcggcttattatttaatcagtccttttaatttactgctcctattttggtcgaatagccagttgccagtggtggttgggtatgtcattattttgaagattggggcaatgggtttaacgatggcccattttctaaagacgcgtcagcctgaatatcatttttccgcgctaatttttgcaacagcttatagtttaagtggctttgtggcaatgaacttttataacctaatgtggttagacgctctgattttcctcccactggtcatcttaggattagaacggctatttttaaaagggcgtcctggcttatatatctggatgttggttgccactatctttaccaactattacttgggttatatgtcatgtctatttgccgttttgtatgcaattagtttgttaatcaaatggaaacaaccccaacagtcttggtggcaactagtggttcactggcggcaggctatctggcagttttgttgggcgtcattgattgcggggggcacaacagcagttgtgttattgccgtcgttacttggaatgttgaagactgggaaaaagacaatcgctgcaaccagtttttatccaaccccgcagtttggctgggaagttttgagccaatttcaagtcggcggcagccattatacgcaacgcttaattcatgaaccaactttatttatcagtacattagcgctgttatttgcggtctattatttctgtctaccaaccattcgacggcaagcaaagtggtcgaacggctttttaattgttagtttagcgttaagtttctgggtaacgacatttaatacgatgtggcacatgttccagcaaccagaagggtttccatatcggaatacctatttaatggcatttgttctcatcaagattgcctatgaagcaagtattgaaccaatcggtaaacgtcaaacgaaacgcctggttattttgatagtcggtggcctgctcagcattggccagttggcgctctactatgggccacatgtacgtggtgtgcagaaacaatcgctctggttgttaatcggactaatggttttggctagcgttatttttgcagcgtggcaaaaaggagcacgttggcaaccatgggtgattggtctgggaaccgtattgacgtttagtgaactggtgattaatggccgcttgacgaccactaagttaccgatgggcgatcaagttgtttatgcgcaacaataccaacgccaagcagcactctttgaacagcttgaacggcaaacacctgatttctatcgcgttaataaccaagcgattctcttaaaaaaagcgtttaaggaaccgtattatgggtacaatgatgcgttgacctttggacagtatacattaaacaattattcttcgacacttgatgagcggatgcggacgatgttggttaatctcggtttttatagtaagaatgcccggcggattaacgggattgggcatactgtgctgactgacctactatttgccaatcaatatgacctaattgctaagcaaggacaggttgtgacacaaccccataaaacgttaggcttagggtttgcggttaatgaccagctagcacacgtggctttaaaagcacatgagccgtttgaaaatcaagatcgaattatgcaggcgatgacggggcaaacgacaccattttatcaatataatcaattagatttacaagcgcaaaaacgtcggcaaattacgtttacaacgcaagttaagacaagtggatatgcttatctatacttgccgcaacaaaacttatcaaagctcaaagtgaaaattaatggccgaacacataaagcaccgattgaattgaatgggaccacgattattggtttgggtcgctatcaaaaagggcaacaactaacgctgacaattaccagtcggcaacctaaagcctttcgtaagattcaggtggctagtttagaccaggttcatttcgatcaagcttttgatcagttggcacaacaacgcttaaagatcgacctaaaacaactgtcggcagataatggtcggattgctggtgtagtaccagctaagaccgctgatcaattactttatctaagtgtgccgtatgacagtggttggcatgcgcaagtcaatcatcaaacagttcgtacacgacgagtgatgggcaatatgcttgcagtgccacttgagaaagggactaaccaagttcgcttagtctatcgtgcgccgggactaattatcggcgcgatcatttcaacatttagtttaatgacatggggacttatcttaattaagcaacgctggtattaaaaaagcaggttaacgatgacaatcatcatcgctaatctgctttttattgtggcttatttggggtgtagttgagtggctaagccgagaccaattaaggtcaggccgagcaaactaataaatacgacttggtaaccggcgacacttaaaaggagagttgcaagggtgacgcccagcgcgcccgcaatttgacgaatcgtggttgtgacggcagtgccgtcagcgagcacttgatccggcaggctattagcaccaagtgtaacagcaggcatcatgacaaatgcgttgccgccttcgatgaaacaggcacacaggatcatcaatggtaatgacagccattggtagaagccaatcaaagctagccatccaatgctaatcatggttaggccaacgagtaaggtcggtttaaagccaattttatcagctaaccggcccgcgagtggattcaaaaggcttaacacaacggcagcagggaccaatgctaatcctgaaagaagcggcgtcaacttcaattgagcttgaaaatataatgggtagatgactgtggtgacaatcaatgaaatataggaaatagcagtcaatccgaccgcaatatcgtagttaaggtaaccgagaatatgtaaattaagaagtggcgttgtctgggtgagttgccggtagacaaaataacccagtgctaggcagctcactaatccgataccccagagtccgattgggttgatagtaggatgattagcgctactgatgacatataataaaccgattaatccagttgtacataaaacggaaagaccatcaaggtgatagggcttagccggcataacatcagaaatagtgaagttagctgttgctaacacggttaagataatcagaataaaggcgatgaatagtcctcgccagctgaagtagttgagaataatccctgaaataatcggcccacaagctagtgcagagcccattactaaaccagccaggcccataatttggccccgttgattttcagcagtaatggttaataagacagtttgaaacgatggaaataaaacacctactgcgatggcttccaacgcccgcccgaacaatacccaaccgaactgattagcgaagacaattaatagcgttccaatagtaaataaacttaaaatccccatgtagagtcgtttgaatgggatgttgtttaataaccaaggactaatcggcatcatgacacacattacgagcataaaaccggttgtcagccattgaacagttgtggctgataaatcaaaataggccattaaggttggataagcagttgaaagggcagattggctgatagacattgtgaacgtgccggttagtagggtgaatgtaaatagttttagtgctgttccagatagataacgttggttggacaagtaatcagatcctttttttggcttaccttaactataggacgtcatgttttatttgtaaaatgaaacgcaatttgaaatcattatcggtaacaaaggctaataattagccttttatctatatttagtatatatttatactcatgataagtatttagatattatattaaagggggaacgaccatgagtgtcaaagcggatcaactatcgactcaggaatacatcgtacggtggaatcaatttttagaacggtttatcgtgtttgaaacagtatttagtgagtacacccagaccagcaagaacatcatcaaggggcgctgtctggtggacgaaaatttggaatcgttaaacgaatattttcaatgtaacttacgggtttttaaacaatttattgatcaagccacattactaaacccgccaaaagaattacgagaaattaaccgtcagttacaattagtaatgactgattacgtctcgtccgctgaagccatggtcaccgccttcaacgagggtgatgagttaaaattatatcagaaactcacaacgagccgtcaacaacaaaagagtcttcgaatacgcattagtgaacttttaaatcaaatcgctgtttttaaaacacaggcggtcaaataaaaaaaagacgcccatctggcaactctcagccggtgggtgtctttttttgactagataattttacgccgagcatgttcgataaatttaaacttatcggcacggtgaatcgattcggtgaattggaggagggtattatcttgtagatgggtgacacctttaacactgactacggagctgttaggcggtaggttcagtatctgacactgttcttcagtggcgggaatcaccgtgaactccttactgccataaccaatttcgagtttgagtgtttcttcaaagtaacgatagagtgagtcttgtgcaaccccttttgaaatgtgggggactatgctagttaagacgtagtcgttatcgattaccaggggctgaccgttaacgacgcgcagccgttgaatgtaagtggcaggtaactgctcttcagattcaagatggaaaagggtttggggaacggtcgtctgtgttaattgcaagacttgagtgtcagtatgcatatcgaaaagactatctaattcacgataactggtcaatcctgaaatcggaaaagcatacttgtctagaccgagaaccaaagagcctttccctttaattttatggataaagccattttcaagtagactacctaatgctttgcggacggtttcacgcgacgcaccgtagagttcagtgagttcattttcacttggtaagaaagtgccgctttgatagagttggtgcgtaatcttgcgcacgagatctcgataaatcatttcatattttttagccattcgatattctccaatttgttttctcatttctatcataacggggattcggtgaagttgcaaggttagattaagcgctaacaagaaagcggttttaaaaagtgttgacaacttgtacgtacatgatatatgattacggtgtactgagaaagcgcttttattcatgctacttttaattcaataagattcgggaggaattattatggctcaaaaggattattcacaactcgcacaggcaattgtcgccggtgtcgggggtaaagaaaatatcgatagtttaattcactgtattacacggcttcgtttttatctaaaggacgaatcaaaagcgaagaccgaagaaattaaagcattagatggggtcattaacgttcaaaaggcctctgggcaataccaagtggtcattggcaaccaagtcactgccgtttatgatgccgtgattgcagaaatcgggacagagtttgctggcgaagatgaaacggcccaagttgtggctgcaacaacgcgccaacaaaatttaacgccatggggccatgttaaagaagcctttaatcaattaatcggcgtgattaccggtgcgatgagtccgattgtcggtatcttagctgctggcgggattttaaaaggtgtcttggcgatgctaacgatgccacaacttggcgcgttattaagtgctaagagtgaagcgtacattgtcttaagtacgatgggtgattctgttttctacttcttacccatgttggttgggttcactgccgctaagaaattaaaaggtgatccagttttaaccgctgtcatcggtggtgttctggtgcatccttcattagtggctttaaacgggaaatcattgcttgaaatcgggtcattaaacttcccaatggtcaactacacatattcgattttcccaatgattctcgctgcttggttggttgctaaattaaccaaatgggttaaaggctggttaccaggctacttacaaattatctttacaccattgattgtgattgcagtcgtttctgccattacgctttacatcacagggcctgctattatttggttatcaaatggtttagcattcgggattcaattcttattattaaagagtggttggttatctgggttattaatcggtggattctatcaagtgcttgttatcttcggattacactgggggattttaccaattattgccaacgatgttgccgcaacgggtcacagttacttgaacgcgattttaagcacaacaatggttgcacaaggggccgctgttttagctgttgcgattaagacccgtaaaacagctttaaaagaattatcatttgctggtgcgatttcagcattctgtggggttacagaacctgctatttatggggtcaacttgaagttccgacgcgtcttcattgccggtttacttggttcagccgctggcggatttgtcagtgggttattccacggtaatatgttcggtttcgcggggtcgtggatcggctttgcatcattcttagatccaaaacacccagcagatttatcaaacttatggattttcattgcatcatcagcggttgcaacgattgtgccatttattgtaacgctcgtttggggttataacgatcaaatgacagctggtgaagcaatggctaaaccacaaaaaccaggaacagcaaaataaacgactgaaataggagagatatcgcatggcatggtggcaaaaagcaacagtttatcaaatttatccgcggagctttcaagatgccaacggtgacggaatcggggatatcaacggcattattcaacggttagattatttacaaaatcttgggattgaattgatttggttgacgccaatgtatgtttcccccggtcgtgataacggttatgatattgcggactattaccacattgatcccatttttggtgatttaaccgattttgaacgactcttaaatgaagcccacaaacgtgggattaaaatcatgatggatatggtggtcaaccatacttctgatcaacaccgctggttccaagagagtctcaaaggcaaggataatccgtaccatgattattatttgtggcgtgatccagtggatggacacgaaccaaataattggttatccaagtttagtggcagtgcttgggaatatgtgccagcacttgatcaatattatcttcacctatacgaaaagagcatgccagatttgaactggcggaatgaacacttgcgggccgagatttttaaaatgatgcaattctgggcagaccttgggattgatgggctacggttagacgtaattaacaatatctcgaaggataaagacttcccgaatgatacgtttaaaacgccaagcgacgatgggcgcaatttctatacgaatggaccacatgtgcacgaatacattcatgaaatgtacgaaaaggtctttggcccgaaccaatttgtcacggttggggaactttcctcaaccccaattgatgaagcgattcgttataccaatccagcccgtgaagagttatcgatggcgtttaccttccatcatgtgaaggttgattataccggtggcaaaaaatggacactaggcgattatcggctgtctgatctaaaacgggtgcttagtgattggcaaacggggatggctgccggtggtggttggaacgcattattctggtcaaatcatgatcagccgcgtgccgtttcgcgcttcttggatgacggtcaataccgcgatcaatccgctaaattattagcattagtcgaatttggcttacaaggcacaccgtatatttatcaaggggaagaaattgcgatgaagaacgcgaacttcaccgccgttgaccaatatcaagatgctgaatccatcaatgcttaccagcaaatgttgagcgacgggattgatgaagcgttagcgattaagattttacagcagaaatcacgcgagaactgtcgaattccgatgcaatgggatcaaacggcgcatcacgggtttacgactgggacaccatggttaatgccggttgagcacgatgattactcagttgccgctaagattcatgaacccaatagtgtctttgcattctatcaagaattagtgcgaatgcgtaagcttatgccagttttaattgaaggggactaccaattatttgaaccagaggacgaagcggtttacacttatcaacgacacctagatactgaaacgattcgcgtgatggctaattttactggtcaaacacaagtccgttcaataccacacgtcaaggacgtgctcatggataattacgaacaaccgcagtttgatggtcagcaaatcactttacgaccttatgaagctatcatgatgcgggtttaagaaaagaggaagaacgatgtttaattttttgaaaaaaggaccagttggacaggtaacagcccccgttgctggcagttatttaccaattgaacaagttaccgatgaagtatttgcaagcaaggcagttggcgatggctttgccattacccctgatgaacggcaaacaacgattagcgcaccaattgacggtgttgttagttcgattttccccactaaacacgccatcatgattacaacaaagcaaaatgttgagattctgattcatatggggattgataccgttgaattgaagggcgcgccatttacgatgcacgttgaagcgggtgatcgtgtcaaggctggcgaagcgattgttgatattgactggcaacaactagcagccgcccaaaaggcaacgactatcatggtcgtcagcggtaacgccacctttgcaccagcagagccactaccaacaacagttacgactgacaccattattggacagttcgacttagcggcagaataggtgggttaagatgcaaccaatcattattgaatctgatgatttcgggatgaccataccgatttcgcgcgcaatcattactggcttaaaaactggcgtgatttctaccactaatgcgcaagtgacatcgcctcattttgaaatgagtgcggtactcgcccagcaacatgggattacggcaatgggattgcacttggttttcgacaaagaccgcccaattagtcagccactgacgattcccagcttggtaaccccggctgggttttgtcatgcttatcaaaccttacaaactcatccaaaacagttggccattactgatgttaagcgtgagtttcaagcgcagattgaccgctttttggcgagtgggttacaactcacgcatttgacatcgcaccattttgtggcaacgttaacgcctgaaatctatgcaattgttctagaactagcgcaaacgtatcatgtccctgttcgcaatgaaacggcgcatttaagaccgacagaacaagcgtcctacctgctattaatatcggaatatgccgttttaacgactgggacgttgataacggcgcaacaaacaccgtatttaacgccacaggaaatcaaacggcaactgacgcagaaaaatttggtaggtacgccggtgatcttaagccatattgggtatttatcggcagagttacggcataagagtcgtctgacgacgaatcggctagccgaattcaatgcgcttaaaacattaaagcaaaccaattattgggatcaatttagttggcaactgacggattactcagaattaggagcgaagtagcaaatgacacaatatcaacatttaacggtacttggtgatagcatcacggatcaacgtaatcattacgcacacaaatggtactaccagtggttagcagaatggctcgcgattcccacaatcaccaatctcggaatttcggggtcgacgattgcccaaccgtatgatccgatggttgaacgctggcaagccattcctgaatcaacggatttattattgatttatgcgggtgtgaatgactttggtcgtgatgtaccacttggtcaatttggtgatcagtccacagcaacattctacggcgcactacaaaaattacttggacaaattacgaaacattacccacaagcgacggtttattttatctcgcacgttcatattgggactgacttcttttcggccgtcaatcagggcggttatcagcaacaagattatgaaaaagcgatcgcgcaagtgacggacttgtttggcgttcagcatatcagtttgtttaacgaatcagcgttgtcatttgcggatgcacaacaagcggctgagctgagtttagacagtctccatcccaatgatgctggccatgaaaaaattgcccagttcttgagaactaaaattagataagcaaaaaggcgtcgagctaaaagttaatttaagctcgacgcctttttttgtggctgaatttaagttagattagaacaaatgatgacggatttctttagaagagttggccaatcccgtagtgaatggccattgtaattaaaccaattaggatgttccgaataatggagactttgactttgccatcgcccagtttagcgctgataaacgcggtaatggaaaccgcgatggtgacggcaatgattgtgccggtcatcttgtaggcttcaggcagtagaatcattgtcacaagggggaagacgccaccgaaagcggctgagaagagggatgcaaacgctgcggcccacgggttcatataatggccaagctctaggtcatatttaacattaacaattgttgctaaaggcttcttatgcattaagtccttagcgattgcgagtgccgtttcagaagtgacacctttggcttcgtaaaaagcttggacttctttaatttgatcatctttagctgtttttaagcgtgcttgttcaatggcaacagcggctttttccgtgtcactttgcgaactaactgaagcatattcacccgccgccattgaaaaagcacaggctaataaatcagcaagtccagcgataaaaatggtgaaattattggttgtcgcggcggcaacactaaagagcacaccgacaacggttagaatcccgtcattagaacctagaacgccggctcgaagggtattcatcttttcttccatcgtttgatggggtttttcagttgttttgagtggggctttaagaggggtcataaaaaaatcctttctaagcgattattgtttgaataatgtcccaatagcgtaagtgactaccatggttaataatccggaaatcacattgcgcaacatggcttttgaacgattcgctttgccgagagcggctgcactgtagccggttagcgcaagggcaatcatcactgcaatgatggtggcttgcacgcgaatggtttggggtaataaggtgattgcggctagtggcaaaatagaaccgattggaaatgagatgaatgacgcaacagcggctgcgtaaggactggtaaaagcagtcgggacaaacccatatttttcacgtacgacagtcgtcaacggatcagcagtcatcatttcgtgtgtagcccgattggcaagttcaggatcaatcccagtgttgacgtatttttgccgaacaaaagccatctgagacgcataattactgtttaaattcaatttcgtattaatgattgccatttcctgtgcgtctttttgcgtgctgacagagacgtattcgcccatcgccattgagatcgttccagcaatcattccggcaattcccgaaatgaagatggcgaagctattgcttgtagcgccggcaacaccgataacaattccggcgacggataaaatcccatcattggcacccatgacgctagcccgcatcacgttaattttttgggcgagtgataatttttttgacaaggtgaagcctccaatactttttattactttataatgattataattaataacaactttcattttagtcaatttaatttgaaagtcaagtagcaacctagaccaattaaatttgaaaaatggcttgccttcgagtgtactttaaggaatatgctaaagacattgaagaaggggtgattaaaatgagtcgcattttagtattaggggcagccggacaagtggcccagttagttattgagcaactgttgaaagaaaatcaacatgagctcgtgctatatttacggcacgctgaacggctaagcgcattagcacaaaatccacatgtcacggttattgaaggtgatgtgttggatcaagagctgttggcagacagtttagctggggtcgatatcgtttacgcaaatttaggcgggcagttcgaaccattaatgcaaaacgttgtcgcgacaatgactgcagcgggcatcaaacgattaatctatatcagtggattaggcttgtatcatgaagtgccaggtgcttttggtgagtggaatgaacaagcagtcggccatgaagtcatggaagacacgcggcgggcggcgaagattgttgaacaatcttcgcttaactatccattttacgttgtgcctatatgaccaatgaagatcggatcgattacgaattaactgaaaagggaacaccgtttaaagggacgattatttcacgacggagtatcgcgcaagttgttgttgatttagttaatcatcctgaaaaaggaattggggcaagttggggcattaatcagccgaatattgatggcgatcgtcctatttattaaaaaacttgccttatagtatactctaaggtataagctatttttgtaggagggatgtcgatggcacaagagcagtacaaaatcggcgagtttgctaaattagttggtttgtcgacttacacattacgttactatgaagaccaaggcttgattatgccgcaacgcgatgcggccggtgtccgcttttatacattagaggacgttaagtgggtcgggtttatactccatctaaaagggaccggtatgcggattacagaattaaagcaatatgttgcattgcgggctcaaggagacgcgacgattgaagcgcgcaaagctttattgcaaaaaacaaaggctcaagctgaagccgaattggctgagcgccaagcaaatttacagatcctaacgcgtaaaattgattggtatgatggtaaattggatcagagtatcgatcaagcagagagttttgaaacgtatttacaacgatttgaatcctaataaagtgaggttattagaatggttaagaatgaacaattaaaagaaaaacaattattcccagttggagaagctaatgtggcttatcaagacttcttcgtcggtcaaagttatttatcaatgttagtgagcgaaccagacgtgaatgtcggtgtcgggaatgtcacgtttgaacctggttgtcggaacaattggcacatccatcatgctgggtaccaaattctattggtgactggtggcgaaggctggtatcaagaagaaggtaaagcagcacaacacttagtcccaggggatgtgattgttactaaagacggcatcaaacactggcatggggccactaaggatagctggtttagtcatgtcgccatcactgccggcacaccagaatggttagaagctgtttcaaatgcgctttatgacgcactttaattcagaaaggggtttttaaaatggcaaagaaacaaacagcaggccgcgatctattgggtgattttgcacctaaattcgctgaattaaacgacgatgttttattcgggcaagtttggtcgcgtgaatcagagttaccagcacatcaacggagtttaatcaccatcagtgccttgatttcaggtggtaattttgaataattaccagcgcatttaaagattgataaggaaaacggcattactgaagctgaaattgtcgaagtgattacgcatttatcattttatgtcggctggcctaaggcatggtcggcgatgaacgctgctaaagcggcttatcgaccagaataattaatcagggattaggacagataagattgtcctgatcctttttttgatggtatgatagacaaacaaatcagcatcaagaagtggaggaaaggccttgaacgagccacaaaaaaattataccaacggtgttttaatgactttatcagtgattggaatgaaatggaaaccgttgattctctgtcatcttgtggcaggacctcaaagaccggccgaacttaaaagagtcgttcagggaatttcagccaaagttttaaccgatcaattacgtgaattggaacgagatggcatcattactcaaaaagtttttaacgaagtacccccacacgtggagtatgcgatttctgcgtacggcaaatcattggtttccgtcctaggaatgatggccaagtggggcgaagatagaatcgactttttacagagcaatggtgatgatgtgcagttggattatcgagaccatgagaaatacgatatttaaagaaggcgataacatttattcaaaaagaatgttgtcgtctttttagtgatttcacaaaacttactttgaggtgcgttagttagttgaaagtgcgtaattgtttattgcgaagtacccgatatactaaccttatcaactaaaaagtgaggggaaaagaaatgaatgatattcaaaataaagtcgttgtgattaccggtgcatcaagtgggattggtaaagagacggccaccttattagcagccaaaggtacaaaacttgttttagcggctcgacgaacaagtgcgttggcggcgttggcaacggcgttaaccgctcaatacgacactgaggttatttaccagcaaacggatgtgacgcaattagcagacatgcaagccttaatcgaattgacaatcgctaaatttggtagaattgatgtgctattcaataatgctggcttaatgcccgtctcaatgctacgcgatggcaaagtcgatgagtgggaggctatgattgatattaatatcaaaggtgcgctatatggcattaaatatgccttacctttaatggaacagcaaaagagtggtcatatcattaccacggattcagttgccggtcatttcactggtgaaggcttatccgtttattcagccactaaatatgcaatgcgcgcagtgatggaagggttacgtgtggaagaagttggaatgggcattaaatcaacgttaatctctccaggacatgcgcaaaccgaattagccagccggatagtgatccgcaattacgagcagctgttctcaagagtgaaactgaaactggattaacagcaaccgatgtcgctaatgccgtaatgtacgccatcgatacaccagataatgtgggcattaatgaagtcattctccggtcaattgatcaaagagactattaagccattggtcaaagattgaattgagtcttgacaacgaacgctaaaaataaaaaatattttcgaatggtctagttcagcgcttgcaatcgtaagttaacggcactttcaaaaaggctttaaaatcagctaccacaaattgaattaaatacaagagtttaaattagaatgcttagtgtgtaccatatatagtgttgtttcgtcagatggtacatcaatatatggaaaatggtgttgacaatctggagtgataactaaattcatataaagaggggttcagttcaatgcaagacaatcgtgcaatcaccagtgtatttaatcctaagtggtacattcaacagatgaaagggtggacaacatccagttatggtttgttgatgtttgggttaggctttattttagctgctactatttccggtggtccaataactggcgtgtcgtttttaacgatgctcgcggggatgttaggcttcacctgtactattagtattacgaatacgaaacctttaaatggtgtctttggtgtcatctctgcattaatctacattattgtggcttataatgctaaaaactataacgatatgttattacaaaccgtctacattattatgttagacatcccagtcttattaatgccagattgggcgcaaaacgttgataaaaaagtccgggggcttgctactcgtggtaaaggacttcgtaattgggcgttgacgctattgttctttgctgtatcagttgggttattatatctctgggaaagcaatatgacggacagtccacgaccattgatcgatagtatcgccgcttcagttgggtttactggcgcactgttgaccacattacggtttaaagaaagctattacttctggttcatccaaagtatcgtatcaatcacgttgtggggcattacagcaatgcagggtggttcaaattgggtcttattcttcacctatatcttgtacttatcaaacgacttagtctcattcttcgacaagaacgtcgtttggttccatcctaaagaagccattaccaaaaattaaatcaataaaaatagcgtcccaacacaccgcaatgtgttgagacgctatttttatgatggccgggttgttttatagttcaacaccgttttcttcaaataattctggtaatgtcttcagtgattgaccatcgtattctgcgaagaaatcagccacgctgtattctttaccagcaggacgagaagcatcatagcttgcgctaattgtttctgttaacttaccatctttaatggttagttctaattcttcaactggaatactccgtttgtcagtgatcttagcatcaattaagaatggtcggccagcttttgtgacttcaagggctttgtcaaaggcagcgggtaattctttagaagaacgaacggtgattgattcaatgcccattgcttgcgcaatcatggcaaaatcttgatcttcaatgaagattcctgagtaatccattggaatatcatcttgttcactcttgatgaagtttaatgcggcatttgatgtgataatgttaatgattggtaattggtatttcttttcagtgatcaagtcttgcatgaccattgaaaaggcaccatcacccgagatgttgaagacttggcgatctgggtagctcaattgaccagctaaggcaccaggaacgcctgaacccattgaagcaaagagggcagaaatcacccatttgttcttaggcgttaagttcaagtgacggaaactgttgatgatattatcaccaacatcgattgaaaagacagcatcgtcttcagcaatccggttgatttctttgtagattggttcgaattcaagcggatcagagtcgcggttcgttaaaacatcaaggtaggcttgccagtttgccatatcagcaacagcagctttgaagaatggtgttggggcaaccgtttcacttctggcgattactttttcaacaaaagcagttgcatctgaccagatcccgaagtctaagaaatggtgacggccaaattgtgcttcatcgttatcgatttggataaacttgaagtcatgtgtccgataaattaagttggcaaatgggaagtcagcaccgatggcaatcacaagatcactaacggccatgatttcatcagccgctttagaagcagcccggttagccatgcctaagttaccttcataactatcaggcactaaccctttagcaagcccagtcatgacgattggaatttgaagtttctttgataattcaacgagcttatcgccgccgtctttaatcccacgaccaacgtgaattacagggcgtttagcgtctttaaccattgctaagaattgatcaacttcttcgtctgttgcgactggaccagccacttttttacgatctgaaggtgagcttgagctatatggtgtatctggaatttcaacgtagccgaagtcatttggaataacaaccactgcgacgccattgtgtttgtaagcttcacggattgctttatcaacaacgtatggcaagctttcaggtgtcataacgaggcggttataaacagcaacgtcagagaacattgggttttcagcgaattcttggaagtagttgtagttcatgttcttgcttggtacttgaccaatcaaggctaaaactggtgcatgatcttcttttgcatcatataaaccagttaaaaggttagttgcaccagggccagctgaaccaaaagcaaccccgattttaccagttaatttagcgtcagcagctgcggcaagggccccaacttgttcgtgacgaatttgaatatattttaaacgatccttttcaatattaagagcattcattgttgagttaaatgagccaccagggtaaccaaagatatgatcaacgccccaagattcgataactctaagcatagcaacactagctggaatagttttttgagtagtaactgtcattatacagatctcccttaaatcaataattaggttgcgcacaaccttatgggaataatttagcatacttagaaaacgattacaagtgttaaacgtaggttaatcatatccttaattaattaaccgctgataaattggtgcttgataagattgaatggatttaagcagcaaaaaccgcgctatccgaaaatggttagcgcggtttgattagtttaaatagtctagtaaagtatcgacagttaatgcttgcttttcagtcgcgttcaagtcggcaatcagtttaccggcttttaacaccaagagtcgattgccatattgcaacgcatcctctaaatcatgcgtaatcattaggcaggtgagttggttatcgcgaattgtttgattggtaaaagtcatcaatgcttggctggaaactgcatctaaagcagatgtgtgttcatctaataacagtaattcaggtttttgaatcgtcgccatcaagaagtttaacgtttgtcgttggccacccgacaagttactaaccgggcgattgagttgttgatccaagtgattcgggagtgtcttggcgagcgctttgatttgtgggagttgttgcttgagacgccggggaaataagcggcggcgttggccacggcgcatcgccaacaaaatattttcggcaacggtcatatcagctgcggtgcccaacttaggatcttggtagacacgactaatgagccgtgtgcgttgttgggcggattgcttcgtaatgtcgtggtcgttgaatagtagttgcccacttgtgggggttaaatcacccgcaatggtattaaaaaaagtcgatttacccgcaccgtttgcgccaaggaggacgacaaattcaccaggattaatcgtgagatttaaatcatttaagagttgtttaggttcattattatcagtaacttcaaaattgaggtggtttaaagtcatacgcggggtcatttggtagtcagtcctttcttttgttgtggtgcgatgatgaagatggccaaaatgacggccgagaagagtttgaaatcattggcgttaaagccgagttgtaagacaaggagtaagatgaggcggtagacgacgcttcctaggataatgctaattagtttggcgatgaaatgcttgccgacaaggagccgttcaccaatgatgatcgcggataacccaatgaccatcacaccgatgcccatgttgacatcagcaaagccgttatattgtgcaacgagcccacctgcaagggcgatcaagccgtttgacagcacgatcccaatcgttttcgtccgctttacggcaatcccttgtgagagggccatcgtgggattatcaccagctgcaatcagggattgaccgaattcggtgtagagtaagccagccagtaataatagggcgatcagcatgatgactaggttaatgactaagagccgttgatcgagcgttaattgatggaatagcggcagttgatataggttgtgttgatcaccaattgccatgttggcttggcctaaaatccgcaagttgacggaatacaaaccggttagcgttaaaatcccggctaacaaactctggacatggaagtagttgtataaaattgccgtcacgagtccggctaaacagccaccgatgaatgcgactaatagggaaaaggcaatgttatgttgttgcaacattaaagcgctgagggctgcgcctaacgggaaactgccttcaacggtcatgtcagggaattttaagattcgaaaggtgatgaaaacgcctaggcttagtaggctccataataatccttggtcaatggttgagataataagattcatttgagaacagctcctttttgattagcgatttgcattaaactctgcggaattgtgatgtggagggcttttgcttttttgaggtttaagactaaatgtcctttgcgtaaataccgaattggagtggttgcgggttttgaacgaccacttaaaacggcggcggtcatcttaccggtttcaacgcctaagtcgtattggcttaggccgacggttgcgagcccgccatctttaaccatcgtttcagcggatggaaagactggcgttttggttttgtcggtcacatggacgagggtgcccattgcactagcaatcgtattatcggtgggaacgtaaattgcatcgacttttgggactagattctggctgacttgttccagatcgttgactgaactaagactggcctcaacaacggtcagccctttttgttcagcaagttgtttgaataagtgcatttgactggtggcagagttatcactgcttgaatagagaatgccgacggttttcagttgcggcatgatggtttgcattaatgccaattgcttttgaatcggggcttgatcggatacgccggtgatattggcaccaggatgggcgttgttcttaacgagattggcactcgccggatcagtcacggcgcctaagataatcggtaattgcttagtggcattggctaagctttgtgcggcaggggtggcaatgccgaccgttactttggctttttcagtgacgaattgattgctcatcagacgtaaattactttgatcgttctgcgcattttgaaaatcaattttgatattacggttgttatgatagccttcgcttgctagaccagcgacaatcccgcgatgaatttcatcaagtgcgggatgggataagggttgtaaaatcccgacaattggcaatttaggttggttggcttctttgatttttttgataccaagtagggtgagcaaactcccaaaaattagaatgaggggtaaaaaacgtttgagtttagacatggcgaaagctcctttaacgtgctttttgaaactgactcttgtgcttaactacatttaccaaaccggtgattacatcaccaatttggtaaattaggttaatgctcagagtcaaaccgtttcaaacgcacttctattttttaacgtgcttttcaaaccgtattcctgtgcctagctacgtcgcacaaacgaccgactgcgtcgttcattcgcaccactaggctagtgttcgaaatatacccggtttgaacgcactcattattatcaaacaaaaaagtcccccacatgacagtcatgtaggggacagaaaaagcctacatggatttcctcgagttaaaatccatgtaggcttaaaattcaatcgattactgatgaatggccgcatggatacaatcaaaagactgtatccataacggcatacaatctcacttagcggctttgccaacgaatattcaattgtactaagtgagtgtttgtcattttcagtaacctccgttttatttgatgatttgaagtatagcgggatgggtgaaacaagtcaaggactttgagtaattttcttttgaaaataaaggtgggtctagtctgaaaaagcggtcgatctggcttgctttttagcgctaaaaaagctaaagttattaacgtatacttgtgtttaaaaacaggaggaataagacaaatatggcacatatttcatttgatgcatcccgtttggacaaatttgtccaatcaaacgaacttgcagaaatgcaagcaatggttaatgctgcagactcacaattacgtgaaggcactggtgcaggcaacgacttccgtggtttcttagatttaccagtgaactacgataaggacgaattcgcccgcattaagaaagctgctgctaaaattaagagcgattcagaaattttcatcgcaattggtatcggtggctcatacctcggtgccaaagctgcaattgatttcttgaataacacgttctacaacatgttaccagcagaacaacgtgacttcccacaagtattattcgccgggaactcaatcagttcaagttacttaaacgacttagttaacttgatcggtgatcgcgatttctcaatcaacgttatctcaaaatcaggaacaacaactgaaccctcaattgctttccgtgttttgaaagacaagttgatcaagaaatatggtaaagaagaagctaagagccggatctacgcaacaactgaccgtgctaaaggcgctttgaagacagaatcagatgcagaaggctacgaagaattcgttgtgcctgatgacatcggtggccgtttctcagtattaacagccgttggtttattaccaatcgccgttgctggtggggatatcgaccaattgatgaaaggtgcagctgatgcccgcactgaatacacagatacagacgttatgaaaaacgatgcatacaaatatgctgctttacgtaacattctttatcgcaaaggttacacaaccgaattattagaaaactacgaaccaacattgcaatatttctcagaatggtggaagcaattgatgggcgaatctgaaggtaaagaccaaaaagggatttatccttcaagtgctaacttctcaactgacttgcattcattaggtcaatacatccaagaaggtcgtcgtaacttgatggaaacagttgtcaacgttgtgaaccctaacagcgacattgatattccaactgatgaaaagaacttggacggtttaggctacttagaaggccacacaatggacttcgttaacaagaaagcttaccaaggtgttgtcttagcacatactgatggcggcgtccctgttatgtcagttaacatcccagatcaaacagcctacacattaggctacatgatctacttcttcgaaatggctgtctcaatctcaggttacttgaatggtatcaacccattcaaccaaccaggtgttgaagcttacaagaagaacatgtttgcattacttggcaaacccggctttgaagaattaggcaaagaattaaacgaacgcctataattcaacgtttataaagataaaattcgacttttattaaagcatttagtctattgattttatgaaatggtgcagtatttggtgcattgttctaaaataaatggattaaatgctttttgtttaatacggataaagaataaaatatataaattgcttatttttagtaagcgaagtataatgaccttatcaaagatgaccaattcatcaataatattaaaagtaaaaatggagatgatggcaatgttagtcattcaatatgtcaacggtcaaacgaacgctgaaaaggtttatcaaaaagcggctgaatttgtcgcaaatcaacaactggaagtacccgatttcgaagattacgtcgcaattaagcaggtgacgttggatgggcagccattaacgttggcggatgcgaccatgcgcggcttatataattatttaaatcaataaagttaatctgaaagaaaaacgtcgctcaagagagcggcgtttttgagttataaaataaaaaagaccagccaacggcagtcttttaattaacgtgtagtaatcataatgagatttgagatgtgataagtttcgctaggactattttcgaggataaaagccggcgtgtccttaacaaagtgcgagatttttgcgacgatatctgcagcagcacagtctttgatggtcaacttatggcgtgaaccattcgtagaaccaaaggcagataatgtgtcattttgttggagcgcaatttttgagccctcgttaaagaataacttaaccataatttaaaaccatctttcgtaagtaaatcatataatattgataagaaaatcacaaggataattaacaattcaatacccttaatattatccagtgcaattaattttcggaaaattattcgttaaaagaaactactttttctaatattcaaacgccatttcattaaccgattcttccaagccttcgacaacttcattttgttcaatgaacgttaaccaagtttgatattctttggcgtgttcaccacgaatgttgaatgccattttcacttgaatactagcgataaattcggcgaccattttatcaacggcccgatcgaccttattctcgttccaacgtttggcaggttggcgtttttggttcttttcattttggtagtctaaacctttggctcgaaatgtatcgatgacgcgggaatgttcttcaagataggcctgtagttcggcattgttcatagtcgtgctcctttaaactctaatagttagcaagtaaagattttagttcagcttgggcagcggtgtcttcagaaacggcaaagacaagtggttctgagtaagcttgtttgccgtcatcttttagttcgctgaaaccatcattagttgatgtgaggtgaccattacctaatttaagttcatacacgacgccgttatcaccaagtaggtatttgctaaccggtttgtccattgccatgttaaggctgtaattatccgcgaatgatccacgatctaaattgtctttaccgactgttccatccaaagcggtataaaagacacagccaccaattgcatgaacagggtaggcattaaaccctgggcttgctgtcccaggttgaactaaaatacggccatcaggtgaattggcaaaccaatcgccaaatccggcagcaccgtggtcaaaataccaatcactgacggccatgtttccaattgtggcgcgcccagccgcccacgctagaaaagcttgattaacagaagtttgttggtcggcagtgagcgcttttttggtacttgttgactgattagattgttgttttgcttgttcaatagattctgaagctgcaacgatactttctgattgttgtttaatagaagcttctttcgagctagcgattgatcgacgctgattgctttcttttgcttctgatgaggcgcgatagcgtgctaaactttcagagtgggttacggcttgttgatcaggtttaattgaccgacaactagctaatgaaagactacttaaagtaatgaacgtgactgcaatggttcgtttatgcatgttaaatcccccaagttaatgattaataagtcattgcacggtgtccctgtggcgcagcaattttccagaatttatcaaatgagattttttttcgtttgccggtatatggatcgttaaaggtaaatgaattttgatcatagccaattaataagacggaatgcgctggttgtttatggtagttaatccaagcgacaattggtttcttttgttttaaagtggctttgagcgtgctaatcggttcgtccgataaatcggtgaaactgccgagatattgatagaagaatcctgtccaagcaggaggatacatagtgtagccagtatcatcgtatggattcccccaaaagccgacctccatatcgccatcattgacataggggatactatcggccacttctgttttgctcatgccaacgccacggtaatctaaaagcatggcaacagccgtaatttcacaaccggttggtaattcaggaaattgtgaaataggtgtgatatcgagcatcatttttttggatgtttttttcttaacaatttttttgggtgtggttttatggaagaaccaaatcccggcctcacttctggtcggtcctgtgaaaagccataaaaaaagggtggtaatcagtattaaaacgactgccacgcgcttgtaaaagtgttttggcatttgataatcctcattctaaatttagtcgacgaaataaatatttaaaatagtatagcatttaaaggggcgtaatagctatagccgctcacggatttcaactgtgatggaatcgccaatttcttttttgagttgtgcacggatgtctttgcggaccccaagaatgtaacaaatgttgccatctggatttttaagtcccatattgacaatactgccatcatagggaatttgttggtcgaaaagggcgtggacttttacacgacccttcccgaagattgcgcggatatcgccaggaaattagacatatgcaccgcctttaccaatcgtcgcggcttggattgaggctgtaaaagtataagtttgctcggtcaccggtcagaactccttaaaaaaaacgtcattaaaaaaagtgaccacggcaaattcagtcgtcacttttagtgattattggaaaaagcgcattaattggcgattaaaacttgcccaccaagtgtttgggtgcaaaagggttgccacgattgcttggcgatgttgtaagaaccagcgcttaatattttgatcagacaatttagtgatatcaaacggcatttcgaaccactcctaaactacctttattatatattagaaatgggacacgtcaaaaacaaagcattaaacttaaccaatctttaaaccggcttaaggcttaattaataagacgttggtgttagaatgaacactgatgaattgtgcaacagaaccgattaagagccgctcaaaggcgcccttaccactgacaccgagaactgttaaatcaatatgagcttcttctgggatgataaaggctaattcacgacgtggtgaacccactttaaggatggctcgtacgttagggacaccgtgttctttagcgaattgcaccttttgatcaagatacgattgaacgaaatgtttttcagatgtcgttgtttcagcagggtaagtcatgcgtgcatttgtgtaaagggtatctggaatgatttgagccacaactaattcggcattattgcgtttagcaatttcaatcgcctcactgaaagcgcgttctgataactcagaaccatctaaaccgataagaatatgctgataattaaacataaaaaagacctcctttatttaccttcaatatagcattttaaacgaagaaacgccgtaaataagcactttaaattcgataggggatatctggttgagcggctataacaatttggcaccactaatttgtgccgactgtatcgtttactttgattgaactgcgctctataataagagtgtgaataatttctcccgaaattttttaaccactatataaaaaaagagccgtcgaatcgtagattcggcggctttctttttataaatgattaattgaaagttgtgtgacttgttgcttgttgttattggtcgtcataacggtatagcgaacttcgcgatccgtcagttgcattaatgacccagatttcttaagtgagcggtcgaccaattcagtaatctgggttggtttggttccgatacttgttgaaaaggcgaggacgtagtttttaaacgttagattcttacctgcgttgagagctttaattgagatccccagtactttgctatcactgacgttcatggcaatcacgttgttgctgtcaacttgatcagtgcgaatgccttcaagtggattcgcttcgaaaacgcccagtcctttttgttgggcaatcggattataaatctgaataaagttcggccattgcacaatttcttttgcgacagggccttcaacataagttggattacgcatttcttcattatcagcaagtgtaatccggtactgcttagctttgtaagggacttcgaatgcgaaagcatcatcggttgttttagtcgtatgaatggtatcaccgatttgccaataaacctttttatgtttagtcttaccagtgatttgcgcattgaagccactgtttgtttcgtggagctttgctttaaccggattcccacaagcggttaaaataaaagttagacctaaaatcatgaataataatttgacgtgacgcatttctcacactcccaatcgataatagggttaactatgaatcaaaaaataaaagactccccagtcttctacttcattgtaacccatttcatctttttttcaaaatcaccatattcactatttaatactactgtaagagaatttcaacttctgaattgcgcggacatgtcgttgattagccttgtaaacatcatcagtgtattcttggaaagttccgtttggacgggttgcaacagagacgaacgacccagtcttggataagacatctttggcataaacgagttcttggcgattgttatcagtcgcgtagtctttcattttttggtagtcaccttgaacactgacatagtaatcatcagcgtcatcgagtttaccttgtgctagtaaacgccgaccttcagcagcaacagcactatcatgatcgttataatcaacatttgcgacgttaactgttccgttttctgttaactcgccccaaactttattatacttttgagcgatgaattcagtggcaacagtcgattttttaatatgtttgatgaattggcgttcagctttatcgaattttttatctttcttttcaatcttcgctagttcttcgcggtgttctttctgagccatgtagaagttatagccaacaggagatgccgcgataatcaaaccaatcaagcaaataattagaggggctttaagccgttttttaaaaattaagaaaaataggagcaggataatgccaaatgcaaagacagcaaggcctgcataaagaacgatggcgagtattaagttcatatagtaacccccaaaacagtaatcggataatcagggttaatacggttaatcaatgaatattatcccattttatgagatattagcaagtcaaatttacagaaaggtctgtaaaaatatgaatcttctcatgaaagggatttaaacagaaaagtcaattgtttttccttgcattttcccgtattataataggatacgtaaaaatatgaatcatttataggaggaatagtagtggacgcttctttgacaacccgtttggctgccgaatttattggaactgcaattatgattatttttggtaacggggcagtagccaacgttgaattaaaaggaacaaaaggttttagtagtgattggtttttaatcgcttttggatatggttgtggggttatgattcctgccgttatgtttgggagcatttccggtaaccatcttaatccagctgttacattaagttttgcagtgatgggcttattcccttgggaaaatgttttaccatacatcattgttcaattcttgggtgcaatggttggtcaattattattggttgctgcttacaaaccatattatgatcgcacaacaaaccaagaaggcatcttgggctcattcgtaacaatcgatgctgctcatagccggatgaatggttttgtaaatgaatttttaggcacattgatcttagttttcggtgctttagcaattggtgcaggtaagtttggcgctgccggccatattgttgttggtttattggtgatgacattagttgcttcattaggtggcccaacaggaccagctttaaatcctgctcgtgatttaggcccacgtttggtgcatatgttcacaccgcttaagaacaaaggcgactcacaatggagttacgcttgggtgccagttgttgcaccaattatcggtgccatctgtggcgcaggtattttccaaatgatttttgcataacaaaccgcttctaaaaatagtccgtcaggactattttttttgctttcaaagcaaaaaatacccggcataaaccttaattgggaaaggcctataccgagtatcttctgaatattgaaatgatcttacttgggggagtattaatcatttctgttattgaatatatcataaaataacgggaatttacaacccttttacgtgtaaaaccctaaaaaaataaattattttataataatgcatattgttaatctcagtctgcaatttatttaacgtgtataatatttcggaggtacgcatattaaataatcgactgagaaaggtgtgcgaccactttagagaaatggtacaatataaaatgttggcgattacatttaaggagagtagcgtttatgattaaatttccagagcattttatgtggggagcagcaacatccgcacctcaatcagaaggatactccctaagttatggtaagtccccatcaacctgggacaaatggtttgagatgcaacctgataagtttaatagcgatcaagggcctgacacggctagtgatacttatcggttgtatcgtgaagacgttgaaaatatgcaaaagattggtttgaactcatttcggacatcgattgcttggacacgattaatgcccgatggcaaacatgttaatcaagtagcggttgatttttatcgggattattttaagcgcttacgtgatgtggacattacaccgatcattaatctgttccatttcgatatgccttggtggctaatggaaaagggcggttgggagacacgcgaatcagttgatgcctttgcattctacgcaaaaactgcgtttgaattgtttggtgacttggttgatcgttggacgacttttaatgagcctatcgtgcatatcgaatgtggttacttaacgggctatcattatccagacattgttgacttcaagaaggctgttcaggttggctaccataccttgatggcgcatacagcagctgttgctgaatttagaaaagtgaagccggatggtcagatcggcattattttaaatatcacgccagcttacgctaagagtgatgcaccagaggatttaatggctaaacaaaatgctgacttactactcgctaagagttttctagacccaactgttttgggcgttattccagaagaattaattaacctcttaacaaaacatgagttattaccaatgacgaaaaaaggcgaccggcaattgattgccgatcattgtgtcgattttatcggcgtgaactactatcaaccaatgcgggttcaagcaccagagaatccgaagttcccagcacaaacaccggaagacttatatgctaattatatttggccagaacggaagattaatccatatcgtggatgggagatttatccagaagcattgtacgatgtggcaatgatgatgaaaaatgattatcacaacattccgtggtacgtttctgaaaacggaatgggtgttgccgatgaagaacgctttatgggtgaagatgggcaaattcaagatgactatcggattgaatttatgcaagaacatctgacgcaactacatcgtgcaattgaagccggcagcagttgttttggatatcatacttggaccttcaatgattgttggtcttggttaaatggttatcggaatcgttatggtttctactgtgttgatttggaccatgaggcaaagcgcacgatgaagaagagcggtcgatggtaccgtgaattgagcgagaataacggcttttaggccaaaaaaaaagaaccgacgcatcagtcggttcttttttgagttaaaagatatctgtttgaacatatttattgtgtaattcaaagaaatcataagtcgctaagttttcaatatccgcttcaccattgaagatggccgttgcagaaccagccaacatcaggttaattggtaaattatcacggaaacgagcgagaatcactggtttattgtgggcaaaagcataaccacattcccacatggtaccggaatcaggttcgaattcgccttcttcagatttaaaatccataacagcgactacgacgtctgcttggtcaatttgacgcgtatcgacattaaaagtagcgacttgccattcgaaagtaccgaattctgcatcaggataagggtgttggcctggtttgaaaagtgaatcagcatcaatcgttgggtttttaatgagtaaatcagccacttgatctaaccgatcattttgttcgggactaaaaaatgggccagcgagataaacttgtttttttgagggcatgagagccgcctttctcgataatgttcgcgttttttgtagtaatttaagcttaaaaagctatttatttaattatatacgtacgaaaaaaaatattcaatatatgttctgtaaaaaaatacgtaaaaaaaaaactgcttacgcagttttaatgaacgaacaagtaaataaccaatagaataaaggccacaactaagattgtgaacatgtaagttgaagcggtactaacagctttcttacgttcctttgatagtggtcggttcgctagtttcttgtattgcttcttagcaatttcaaattgacgtttatctttcatttgtatccctcgcttgtttcagtgtccctattatagcatggaatacagtggattgataattattgatgataagactggactttcaatctggaacaagctacgataatgctatattggagtataaggaagtaacaaatcatgaaattaaagacaactaaacaaacaactggacataaattatcagttgcagggattttgattacgatgggcgtcgtttacggtgatattggaacgtcgccattatatgttatgaaatcaattgttgaggggaatggcggtttggcaaacatcagccgcgattttatcatcggcagtatttcgcttgtcttttggacgttaatgttgatgacgaccgtcaagtacgtcatgattgcattgcgtgcggataataatggtgaaggtgggatttttgcactgtacactttgattcgtaagcaagctaagtggctcgtgatccccgcgattattggtggggcgacgttattagcggatgggatgttaacacctgctgtgacagtcacgacggcgattgaagggttaaagggtttgccaattaatgggaacgttttaattaataatcaagatcaggtgattttattgacggtctcgatcttatcggtcttatttttcattcagaaatttgggactgatctaatcggtaaatcttttggtcccattatgttaatttggtttacctttattggtggcattggtttggttaacttaatgggggatctaacgatgctcaaggcactcaatccgtattatgcgattgaactactgtttagccctgagaataaggtggggattctaattttaggcagtgttttcttggcaactacgggggctgaagcactttattcggatatggggcacgttgggcggttgaatatctatggtagttggccatacattgcgctttgtttagtgttgaattactttggacaaggtgtttggttattacaacataaagatattgcggcatatcaacatatttctgatttcaatccattctttgaagtgatgccagcccaattaaaggtcccagcgattttactggctacaattgcggcgattattgcatcacaagccttaatttcagggtcatataccttagtatcagaagcaatcaagttgcgcctcttaccacgaattaaggtcgattatccggctaagttaaaagggcaactctatatttcaatcgttaactggattctatgggcggtttgtttaatggttgttttctattttaagaactcagcgcacatggaagctgcctacggtttggcgattacgattacaatgttaatgacaactatcttgctattccattacttgggacgccgcgagaagaaatgggtattggcttatttggtactcatcttcttcgggacaattgaagttattttcttcatctcaagtgccgctaaattcatgcatggtggttacgtgacagtcttaattgcggcgtttattctatcgatcatgtttgtttggtatcgtagtaatacgattaaggaaagtaatactttcaaggcaagtacggtttcattactagcttataaacaacaactacatgatttgcgagacgatacagcgttagctatgtatacgactaatttggtttatctttcaaaaccacagaataaaccatatgaaaagaatatggttaagaagaatattctttattctattttggataaacgaccaaaacgggcgcaagtttactggtttgttgcggtcaatgtcactgatgaaccgtatacggcagaatataccgcagatacgcttgggacggactacattgtcaacgttcagttgtatctaggctttaagatggaacaaaaagtgaacatctttattcgtcaaatcattcaagaaatgattcatcggggagaattaccagcacaaccacaacgctacacaacaattccaaatcggaacgttggcgatttctcgtttgtgatcatgcaagaagatttatcaccagcaactcaaattcgagcaatggataaagggattgttcaaatgcgtttatggttagaaaaattcactgatacaccggcttcatggtttggattggactatagtgatgtgttcgtggaacgcattccgctagttcttggccgccaaaaatcggtctctaagtatcatttaaaacgtcgtgaatagcatcaataaattagtttataacgcctaggacagaagattgtcctaggcgttatttgtgtaatagcagtcaagtaagcggtgtgcattacaattagcgcgagaattgccgtcattttgttacctgtttgtcatcaattgttatggttttgatatgtacaagcgaatataagatggtatattagtcccacgttaataaatcaaaacaacaaggagcacatctattacatgaaatcttttaagacattattgcttagcgctacattgacaacggctgcaacagcagggttacttttcgttggtcaatcaaaagcaagtgccgctactacttataccgttgcaactggggatacgttatcaacaatcgcccaaaaatttgccggtaacacagatttagtcaatcaaattgccacaacaaacaacattcaagatatcaacatgatttttgtcggggaacaattaacaatcgacactgaccaaacagcaacccctgttcaaacgacaacgccagtagttgctgcacaaccagccgctgttcaaacaccagcaccagttgttcaagcacaacctgcagtgcaagctgcaccagttcaacaaataactgctgttgcaccgacaactagttcagcgaaagaatggattgcgcaaaaagaatctggtggttcatactcagcgcgtaacggtcaaatgattggccgttatcaattaaccgcatcatatttaaatggtgactattcagcaaccaatcaagaccgcgtcgcagatcaatacgtaacaagtcgttacggttcatgggatgccgctaagagtttctggttaagtaacggttggtattaaaatttaaggttcctttaacgctcaatcaaatttaatttgattgagcgttttttgttctctgagaaatcacacttgactaaatcgaatgtatgttcgtataattaagaggacataagatgaattaaagaggtgtgcctgatgcatacgaataaagaagtgattacgctagatcaaacaggattgagtttatatttaaatggctttggagttttagaattgcggcgattagcggtgaatcatagtgatgatttgattgactcaatgaattattactacaaccgcgataagtttccgcaatttatttatcgtcatctatcagccgtcaccttgattgagattaatcggtggcaacgcgaattagatgaacaagtgcgtcagattcaagttggggtgaagagtcgtgtatgactatcagaatgaactacgccgcgtgattttaatgattgattcgaaatctttttacgcatcagtagaggccgttcggttgaaactgaatccgttaaaggctattttggtggtgatgtccacggagaaaaacacgggcagtggtttagtattggcagccagtcccatggctaagaaattatttggtatcagtaacgtaacgcgtgcccgggatgttccaattcatgataagcggttaatcattgagccacccaagatgaatttgtacatccaagtgaaccagaagattaaccgtatttttcagcaatttacggcagaagaagatattcaaccgtattccattgatgaatcgttacttgatgtcacggatagttggcaactctttggagcgacgccgtacgaagtcgcacgtaaaattcagctggctgtaaaaaaagaaacgggcatttatttaacggtggggattggcgataatccgctacttgccaagctcgcattggatcttgaggccaaacggaatcacagtttgattgcagaatggcattatgaagatgtcccagataaactgtggccagtgacccagttagatgatgtctggtcaattgggcatcgtacggcagagaaactgaatcagaaacacattcattcgatgtacgatattgcgcatacaaatccctatcggttaaaacaagaaatgggtgtcatgggcgcgcagttgtttgcgtttagttgggggattgatcgggccgttgtacggcataaatataaggccaaagagaagtcttatgggaatagtcaggtattaccacgcgattattttatccaagctgagattgaagttgtgattcgggaaattgcagagcaagtggctgcacgtctcagggcgcatcacaaggcgaccacggttatcagtctggggattggcttttcatttgctgcaaaagaggatgcatcgcgtggtggttttgggcgttcaatgaagattgatgcgactaatgctaatcagcaactcacaaaacatgccatccaactttttcgtgaagaatggcaacacgaatcgattcggcatattagtattgcgtgcagcaatttggttgacgatagtgcggaacaattagatatgttcgatacacagtttattaatttgaaaaagcagaaattagatagcacggtcgatgaaattcgcaagcgctacggttttacatcggtggtcaaattgtctagcaaagtaaaaggtgcgactgcaattgagcgtgctggcttagtcggtgggcatgctggagggaacgcctatgaataatgatgaatatgatcccaatttggttaatcaatttttgaagtatgattattatgatcgtggcatgatgaaatggcaagggttctatttaagcgatcatacggcagtgttagataagaataaccgcgtacaagatcgtaagcgcaatgaaaaacacattgaggcgatgactgctgagatgattgctaataccatcaatgacgcaattgttaaatgttatccggttcaaatcgacaaagcagaacgttcaatagaaggtattgtacccagtaaggtggaaggtttaatcagtggctggtttggtagccaaataattgtggcaaatgaagccattttaatagaagaaatctacgcaataaaaaaactagccccctaactaaagcgtcaggaggctagcttttttacacgttttaaacaaacaaaaaagccgctaaaccttagtttaacggcttttctgggttctaggctgttttaaatatcacccgtacggggatcgaacccgtaactccgccttgagagggcgacgtcttaaccgatttgaccaacgggcaatgttcggaacaactaatatcttagcgaataaagcctgtaatgtcaatggttaattgactctagcgaggctaaatgaagattttatagttacgacgattaatgttaataatttccttggtcatagtgcgatttgtttgtctctttaaatgtttcaagatattccgaatatagtcctgatggtttatcagtagatttagaatatcgttatcaattgtgacttcaagcgtcctgcgtgaatctatccaatcaatcacaacgtggtcttgatcatatacggcaactttcccgtcaaataatttttcgatttctgcttttttcatcattggaaccacctccaagaatagtatagtcctcttttaaagatttgttaaaaatcataattgacaacgtctggagtgtgcagtatcatagtattcgttgatgatattgggtattcgccaaattggtaaggcaccggactctgaatccggaatttataggttcgagccctatatacccaattaagatagaaagagctgagtaatcagctctttttttgtggctttatatcgatagggcagattatttgtagttctctgtctcaaacatgatttggatcgcatagcgatccgcaatcttagctaaagcccgtaaattgaagaaccaatagtgtgctaatagcttacttttgaaaattaatgttgtgtcctgagcaccggaaatttgaatcattcgatcatccaatgcgacgtttaaatctaaatcatttaattttaaaactttcattttgatcacctcgtcttattattacgttaaatagggcgattatttttgaaagaaggttaattaattcaaaatagcatatttagcatttttattgactgtaatccttggtgttattagcttttaggtcgattacaggtcaattaaattgtgggcttcattacaaagttaggtgaaattgccgtcattttgttacggatttgtcatcaattgttatggttttgatatttactaacggatttaagatggtatattagtcccacgttaaacagatagaaaaatcaatttaaacaataaggagtccattcaaaatatgaaatctttaaaaactttactttacagtgccgctttaacaaccgtcgcaacaaccgggttacttttcgttaaccaatcacaagccagtgccgcaacaacttataccgttgcaaatggtgatacgctttcaaccattgcgcaaaaattcaatggtagtaccgagcttgttaaccaaatcgcaacaactaataatatcgctgatattaatatgatctttgttggtgaacaattaacaattgatgctgaccaagtggcaacaacaccagcccctgttgtaactcaacaagtagctgcacctgttcaaacaccagcccctgtagttcaagcacaacctgcagttcaagctgcaccagtacaacaagcacctgtagctgcacaaacaacaactacaacgagttcatctaaggaatggattgcacaaaaagaatcaggcggttcatattcagcacgtaacggtcaattaatcggccgttatcaattatcagcttcatacttaaatggtgattattcagcagctaaccaagaccgcgttgcagatcaatatgtaacaagtcgttatggttcatgggatgccgctaagagcttctggttaagtaatggttggtactaaactaaaataatgacaacgtctaggccattggtctgggcgtttttttatggtaagttagtgattggaagtgtaaactgaaagtagtataaagagtgaggcttgatcagatgaagattttaggagtgttaggcagtcatcaacgagatggggtcaatgggcaacttttagatgccgttttagcaggtgtaaaaccggaagatgacgttgaagtgatctttttaaatgattatcaaatattaccagatactggcaaagccaatccggtattggatgaactggaagctaagttattggcagtcgatgtttgggtgctggctgcgccaacttattggggcgcaatgtcgggtgtgatgaaaaacttcttggattgcatgcggcaacggttagtccgatttaatcgggcgggagatgcgttaccagatcgcttcaaaggcaaaagttacattacgattagtagttgttatgccagtccagctgaggaattggttactggtgtgactgacgggacttttagaacttttgataaagtcttgggggcagctggacttttaaaaatccgggaagttgtccagacaaaaacgtatggtttaaagacactttcagcgcagaaacaagcggaatgtcgccaagtcggcgcaagcattcaatctaaagcaaagaggacggatgatacagtgaaacggtatatacaactatttggcatggtcgcctgtgcaaccttgattacgatggtactgcaacaattagtgaacttagtgttgccaattggccagttttggcttaattatgtgtcattcgttttaatcttcttcattctattggcaagtgtgttacacttttttacggtggttaaacaccgcagacattaggagggattcagatgaaaattgcattgattgcacatgatcgtcagaaaccaacgattgtgaaactggcgacggcttataaacctattttggcgcaacacgaattatttgcgactggaacgactggtcaaaaaattattgaagcaactggcttgccgattacacggtttaagtcaggtcctctagggggcgatcagcaaattggcgcgttgatttcagaaaataagatggacctggtaatctttttgagagatccattgactgctcaacctcacgaaccggatgtgaatgcattaattcgattatctgacgtttatgaagtaccgttggcaaccaacgtcgggacggctgaagtattgctgcgcggtttggacttaggactggtcgactttagaaaagtggtccatggtcaagatgtcaattcaattaatttatagtgtaaagcggattgtaccttatttcgactgtgaaatagtgcaatccgttttttgatttcaattttaatttgcgtataataagagtattgatttggagggattgggttgcaaaaagaaatagggtttcatgatcggctaagcacggcgatgtttttaacgtttcttggtggcttcttagatgcgtattgtgtgattttacgtggtggcgtctttgcgagtgcacagaccggtaatattgtgttcatcggcttagatatcgcaacgaaccagtgggcacaacttcctgaaaagatattacccattatttcatttgggtttggggttattattgtgcagctggcgaagcggcattttaacactggtgggttgaatgtttggcggttgtggttattagggtttcaaattattgctttagtagtagttggttttttatcaaccgcgattcccaacatgtttgtgacaccgattctgtcgatgtcgatggccatgcaattagcgagttattcaacggttaatggctatccatatgcgaatgcttttacgaccggcaattataagaaattaatcgaaaatacttatctatatttagcgacaaaagaaaaaaactaccaacaaaaagcccggtacttcgggttaattgttggtagcttcttcattggtactattagctcagggttaattgttaagttaatcaatgtgcgcactgcatggatagctgcgattatgttgacggtgttctttggttttcaattgtattttacagaagaagtgattgctgagaccaaacatatgcaacgttagccgtaataataaacaattaacatggcaatgaaatatgcgccgcaaacagcagtgctaatccaactggcaatcagaatgatgggatgcgcaataaaggcacgcatgacaaagagaaacaaggttaaaatagcatacttaatacagctgacctttagctgttcaaaatgaggcttattcaaaagaaagatccactaaataaagttgacggtcactaagatgggcggtagtaatccacacatcttggaagccgtctttttgtttttcttcggtttgttgataaaaagtcgtcaataagtcatggtgttctttgacgtactcggggtcaatccggttaacgtgtagccgcatatcagggaacagtttctcggcatctggcagatcgacttggtcactaatgccaaagcgaatcacgttcgcatattgaaacggttctagaaccacttcatcaggatgttcttggatgtaagttaagatggttgttaatgcagacatagtcatgcttcctttctagtcgtttaaaaaatcgtaaagccagcagtaatgttattcaacatgtgtaaggcaatattactcttaatattatgggtgcgatagtagacgatagccagaattaggccaagcagtgcttttgaaatgaaataaatcggatcagttgcgccgtgcatcaatccgaataagatagcacttaacccgattgagatgattggtgtgcctgggaaaaaccaattcattaggaaccctctgaaaagtaattcctccataatcggacctaagaatagggcgtatggtagcatgaaaataccaatcgtctgaaagactgaggttagtacatcaacattggcattaccggtagtatgcataaacgggatcgtaccgttattgacagcaaccatcgcaataaagccaatcaacattgtccaccaaatctgtttggtgaagggttggtcataacgcgttgatttaattttttggtagtaataccacattagggcagtaatgccgatagtcgtgattagaaaaagccaaccaaagactaaaatcagatgggttgtctgttgggccttagggagcaatgttaagccactgacaagcattaaaggaacttgttggatgataatcagaagtaaaaaggcaatcccatgtttgacgtgtttgataagcgccacctccgtgtgcttatcatagcatattcccgtgaatgaataaaagattgaatgcggattgctgttcaaggcacgatgctttatgttagattaaaacagttaagaaaggggtgtctggatgtatttagcaattaaagaaattaaacatgctaaattacgttattcgttgatcatttttacgatttttctaattgcatatttaatctattttttaacggggttggcatatgggctagccaataataaccgttcggcaattgatcaatggcacgccaaagaagttgttattagtcagtatgcgaataaaaacttggcagcttctgaattagatgttgatcaattaccctctattaaaggtgcacagaaaaatcatgcgcaacttgctcagatgatgggtgttgtgagtggttcaggtttaagtaagcaaaatacgagtgtttttggtatcgattttgatgcttttttgaagcctaagttgcaaaaaggacggtatcctaaaaaagcaaatgagattgtggtcgacgacggcttacaaggaattgctttaaaccaacaaattaaattgaatgggcgtcaacaaaagtacaaaattgttgggattacgacgaaccaccgctataatacgcaaccggtgacttatttacggttgaccgattttagccgaatgcgttacggcactgatcagattacgcgcattaatgctttagtattaaagggaaacgcacggattaagacaacggatcagctgaccaaactgacaattccagaattaatcgataagattccggggtatggtccacaggttaagacgtttggtttgatgattggcgcattgctagtcatcgtcgcctttatcgtggggattttcatgtatattattactattgaaaaaacggccgtatacggggtgatgcgagcacaagggatttcaggtggccaattagttggtagtttaatgtggcaatcggtgttcttaggggtgattgggattggccttggtttgttgtgtaacgcattgacaacattggtattaccagcggcggtgccgtatacaaataatcctttactaattggggccttttctgctgttttacttgtgatgacagtcattggcgctttattctcaatttggcggattctgaagattgatccgcttgatgcgattggaggggcataggatggctttaatgcgtttagaaaaaatcgtcaaaaaatttggcgcaggcgaccagcaaaccacagctttagatcaaatcgatttaacgattgaaaagggccagttcattggtttaaccggaccgtctggttctgggaagacgaccttattaacgattatgggtagtttacaaggcccaacgagtgggaagctcttttttaaagatcaagagattagtcaattaagcgaaaaacaacggtctgcattacggtttaacgatttcggctttatattacaaagttcgaatctggttccatttttaacggttgaagaacaattcgaactagtcgatcgattacgtgaaaagcaagcgccacaatcagctgaacaactattaaccaatttaggtgtttggaatcaacggcgtcagtacccaacgagtttatctggtggtcagcgtcaacgagttgcaattgcccgggcattgtatggtcagccagatttgatttttgcggatgaaccaaccgctagtttagatagtaaacgggccttacaggttgctgagcagctggctaaaatcacgaaagagacaggacagacgattgtgatggtttcccatgatgaacgtgtcttggattatacagatcatcaatacgtgatgcgcgatggtaaactgacataatgcgactcataatcataaattttgactaatgttggttagctatcctatcatataggtagactaataagaaggagtgattttgaatgacagataaagaaaagttagatggcatgaaagaccaagtaaccggtaaagtacaagaaacagccggtaaggtgactggtgatcacgaaactgaggccaaaggtaaagcaaagggctttatgggtgaagctaaagaaaaattagcggatgccaaagacaaagttgctgaaaaagccaacgacgtgatggatgatattaaagaaaaaatggacaaagacgataaatagcgccttttaaagggaaccggcagacgatagtctgccggttttttttgtggatttaatgcttgcatgagtgcctaagttggcgtattatgacagtacgtcacaattatgacgctctgtcattaattttcagaaaggagtatcgaaatgccgaagaaaacattttttagattacctgaggaaaagcaacaacgactgattcaagctgcgcatgctgagttttcacgggtaccatttaatgaagcatctgtcagcaacattattaaaacggcggagattccgcgaggcagtttttatcagtactttgaagataaggcggatatttttttctacgaccttagcttattacgcgacagttcaaagcaggatttagaaaagagtctgttggctgttcatggtgatctattcaaggcaattcgccaattctttgctgaaatggcagaagagattattaatggtgaaaatgcacaattttacaagcacctcttcttacatatggattataagaaccggcgcaagatgtcaccagaattaatgcatgctaaacaagtagatgggatgcgctttttagaagaaaacgtcaattacgacttgctcaagattaacgcagatcaacctgaagcgcttagaattttatttcatgagttgatgacgacggtctttcaaagtattgcagcgtattatttgcaacaagaaagtgaccatgcgattacaattgaacaggtccaagaacgcttcgaattagtattaggctggttagaaacaggggccagcaaacaaggataaggaaagaagggacacacaacatgcttaaacttgcaaagaaaagaatgtcaggttgggccgtctttggtgcgattttattcatgacgattcaggttgttagtaacctttatttacccaatttaacctccgacattgtcaatgacgggattgctaagggggatattgattatatctggcaagcaggctttaaaatgttaggtttttcattaattagtattatcgcggccgtctgcaacgtttatcttgcagcacggacgtcacaaggcttaggccaaaaattacgttcagatatctaccggaaggtcatcaatttctcacacgatgaaatggatcaagttgggacgtcttcactaattacgcggacgactaacgatgtggtgcagattcaaaatgtggcaatgatgttcttacggatgatgattatggcacccatcatgttgattggcgcaagtttcttagcgtatcaaaaagatgcgcaactcacatccattttcttggttgtcttaccaatcatggcactcttcattggtggggtgatgtacttcgctgtgccattattcaaggcaatgcagaaaaagacagaccggattaacttagttttccgagaaggtttaaccggagttcgggtcattcgagcattccggcgcgacaagttcgaacaagaacgttttgatgaagctaatactgactacacgcaaaatgcgaagaaagtttatagtattatgtcagtgatgttcccagccatgacgttaatcatgagtgggactaacattgcgattacttggatgggtggacacttaatcgccaatcaagcaatgcaagtcgggaatttattagcgttcgtgacttatgcgatgcaaatcctcatgagtttcatgatgctttcaatggtcttcgtctttatcccgcgggcgcaagcttcagcagtgcggattaatgaagtgcttgatttacacacgccgattgaagatccagcgacgcctaaaacgtttggtgatcaaccagcaagcttggctttcaaccaggtcaacttccgttatcaaaatgcggaacacttagcgcttgaaaacgttgatttccaaatgacagcgggccaaacagtcgccgtgattggaggcactggctcagggaagaccacgttagtcaacttgattcctcgtttttacgatgttgaaacgggtgaagtgacagtcaaagggttaaacgtgaaagatgtgaccctccatgacattcaccaacaagttgcatttgtccctcaaaaagcgaacttatttaccgggacgattcgggaaaatatgcaatatgggaatccgaatgcgaccgatgatgaaatctggcacgcacttgaaattgcacaatctaaagatttcgtcagcgaacttgaaggtggcttagatagtcacgttgaacaaggtgggggcaacttctctggtggtcaacgtcaacggcttgccatcgcacgggcgttggttaaaaaagcggctgtttatgtctttgatgattctttctcagcgttggactttaagacggatgccttattacggaaagccttaaaagaagatgctgaaattcaaaagagtgtcgttgtgattgttggtcaacgggtatcaaccgttgccgatgccgacaccatcttggtcttggatgaaggccagctggtcggtaaaggctcacatgctgaattgaaggctaataacgccacatatcaagaaattattaattcacaaatcagagagggggatgaagactaatggctgaaaaaacaacaaccaatcgaccccaaggtggacatggcccaggccgtggcatgggtggtgtcgttgaaaaaccgaagaatttttggggcacaaccaaacgattattaacctacatgtctagccggttaatcggattagtgattgtgttagccttagcaatcatctccgttattttccaaattagaacaccaaaagtattaggacaagcaacgaccgaaatcttcaagggtgttatgaagggcaatgccatgcaaaaagcgggcatgccgatgaatggcttaccaattgatttcgataagattcaacacattattatgacggtgattttgatgtacttagcatcagcggttttcagtttcttacaacaattcatcatgacgcggatttcccaacaaaccgtctatgaattacggaaagaattaaaagacaagatgcaacgggtaccgattaattactacgacacacactcaaacggcgatatcatgagtcgtgcgattaatgatatggacaacattgcaagtaccttgcaacaaagtttaacgcaaatggtaaccagtgctgtgacatttattggcgttatgtggatgatgctctcgattagttggcaattgactttaattgccttagtcacgattccactcagtttagtcgtcgtcgggattgtcgcaccgaaatcacagaaattcttcgcagcgcaacaaaaaagtttggggttgttgaacaaccaaattgaagaaaatttctctggtcaagtggtcttaaagaccttcaaccgcgaacaagtcacaattgatgcctttgaagaacaaaatgcattactctataaagcagcttggaaggcacaatttatttctggggtcatcatgccgttaatgacgttcgtcaataacattggttacgtcttcgtagcaattgtcggggggattcgtgtttctcacggccaagttactttaggggatatgcaagcgttcatgcaatatacgcaacaattctcacaaccaatcacgcaattggccaacttagcgaatacaatccaatcaacgattgcctcagctgaacgggtctttgaagtcttagatgaagatgacatgagtgacgacccatcagaagtgccagcgattgttgatgaccaaaatctacttgaattagaacatgtcgaattcggttatcaaggtaaagatatcttgatgaaggattacaacttgcaagtcaaaccaggtcaaatgattgcgattgtcggcccaacaggtgctggtaaaacaaccatcattaacttgttggaacgcttctacgacgtgagtggcggttcaatcaagcttaaaggtgtcgatacgcgcgatatgactcgggaacaattacggcgtcacttcgcgatggttttacaagatacttggttatttactggaacgatttgggataatttgaaatatgggaacgctgatgcttcagatgaagccattttagcagccgccaaagcagcgcacgttgacggttttgtccgtcaattacctgatggctatgagacggtcttgaatgaagaagcttcgaatatctcccaaggtcaacgccaattattgacgattgcgcgggcctttgttgccgatccagagattttgatcttggatgaagcaaccagttcagtggatacacggactgaaattcatattcaacacgccatggaacgcttgttgcaaaatcggaccagtttcgtggttgcccatcgtttatcgacgattcgcgatgccgataacatcatcgtgatgaatcacggttcgattattgaaaccgggacccatgatagtttgatggcacaagatggtttctacgctgacttgtacaatagtcaattctcaggcaacgttaaaatttaatcatgaatgacgcaaataaggccgcagataaaatctgcggccttatttttgtccgtgtttggcgtatactagtgatattgatgtagtaggaggaatttaacatgcgatttgaacaaaccatccggcaaattgaagcgctagttgatgaagggattgtccctggtgtttcttatgccatcatcgaaggccctgaagtgatgactaatgtaatcgggcaggccgaattagtgccccaaaaagtgccgttaaaagctgatcagttgtatgatttagcgtcattaacgaaagtgattggcacgacgacgattgttttgcggctattggaaaaagggcggctttctttacgaacaaaagtgcatagtttgttgccggcctttaaagatcgacgggtgacggtcttgcatctattgacgcacacgtccggtttaacgggctacattccgaatcggaatcaattatcggctgccgaattaaaaacggcgcttttgacgcaattaacggtcggcccaaattttggtgaaaaggttgtttacacggacattggtatgttgtatttgggctggatgattgaagccatctatcaaaaaccgattcaggatttgattcaagaactcgttttaaccccactcggtatgcaagccagtacgtttaatccggacaaaagtttggcggtcccgactgaattgagtgccgaacgcggcttaatccaaggcacggtccacgatccgaaaagtgcgattttacaaaatcatagtggtgcagccggcttgtttgccccattaaaagacgttgtccgctttgcccagttccaattagggcagttgaaggttgaacagccaccaatcagtcaggcgagtgttaagagtctctatcgtgattggacaccaaaacatctcgggcgctcactgggctgggatttgcgctttgagccgcaagaacaccagccactgatttatcacaccggttttaccggcacgttcatgctattggatcgcaagcggcaaacggggctgattgtcctgagtaatcgcattcatccaacggctgataatccggtctttttggaacgacgagatgcgattgtggcacaatttttagcggataatcacctagaaacaaaagcctagtcaaattcgcaaatttgcgtattatccgcttacatttgtggtaaaatgggactattgataaataaagcgcattaggagtgagtgaattgacagaacctttatttctaaaatctgtttttcaagaaaaaatttggggtggtcgcaaattagctgaagccttcgattatgatttaccagacggcgatattggtgaatgttgggccatttcagcccatccccatggtcctagtaccatcgaaaatggcccattaaaagggctcacattagatcaagcatgggcaacccaccgcgaatatttcggtaatgcagaaggtaaagtattcccattgttaactaagattttggatgctgaagcaagtctttctgtccaagtgcacccagatgacgcttatgctgctgctcatgaaggtccaaccgaactcggtaagacggaatgttggtatattttggatgctgaaccaggtgcttatttaatctatggccaccatgccaagaccaaagcggaattaacagcaatgattgaagcaggcaagtgggatgatttactccgcaaagtgcccgttaagactggtgactttttctacgtcccaagtggcacgattcacgcattgaacaaagggattatggcgcttgaaacccaacaaagtagtgatacaacatatcggttatacgattatgatcgggttgatgctaagacgggcgaaaaacgcgaactacacttgaagcaatcaattgatacgacgattgtgccgcatcaagatcccgttttgaatattcaaacagaacatgttggagattcaacaatcacgacttatgtgcaaccaccaatgtcaccatttttcagtgtttaccaatggttagtgaagggcgacttacactttgatcggacaacggcaccctatactttagtctccgtggtcgatggtgaaggcgaactgattgtcgatgggcaaacttacccaattcacaagaatatgcattttgtgttaccatttgatattaagtcatgggacttaaaaggtgacatgcaaattattgcgtcagaaccgggtaacaagtaaactgaatataaccaattgcaaccgcagccgtggttgcaatttttttaatgattaaaagagtaggatgacaagtatgcaaagacaaatcgaagcaattgaacaatttgtacgaacggaattggcagcagaacacagcggtcatggattcgatcacattcaacgggtcgtgaataatgcccgtttaattcagcaaaaagagttagctgcggacctaacaacgattatcttggcggccttattgcatgatgtgattgatgaaaaaatcgcgactgatgttgaacaggctcgacaaaaggtaaaaactaaactaaccgaaaacggcatacaagatggccaacaaacggcaatttttgatattatcgaccacatgtccttttcgaaaaatctcaatcaacaccaaacgctaagtttagaagggcaaatcgttcaagatgcggatcggttagatgcaatcggcgcgattgggattgggcggaccttcatgtatggtggcgcacacgatggggttgcttatgatcctgagattcaaccacgggcggaattgacaaaggaaaactatcgcgaaccgtctaccgtgattaaccatttttatgagaaattatttaaattggcagcaacgatgaacacacaggcagcgcgcgaaatcgcgcaagcgcgaacggatttcatgcaccagtttgtggatcagtatttagcggagtggacagggcaacgctaaaaaacgaaacattgatatgcaaaagggcggtaacaatatttttgttagcgcccttttggatagttgtgttctgatcgtttaaacgtgttctgtaagtcatccgaacccagagccacacgctagccatcgaccgttagccagtcgttttggagtagttcgtgggttctcttttgcaggggtaaccacaattcagcgcggaggatattgatgagggattcccagaagaggcggtcctttttttgttggtcggtaatatgtaattcgatttcttgaccactttcagtggttgcgaaaactttatcatgattttcaatccgattaatttgaacggactcgactgctggcatttgatttaacataatgattcgctcctttttataggttaaagtcagtataccgagcaagtattgtgaaacgattatcattttatgaataaaaagtgtattttttcttgcgaaatgattaagacatggcaaattctataattaatccgaacagaaattaaaaagcccaaagcaatcacttacaatggtagtagctaattccaaccaatatagggagtgattactttgggtacatctactttatcacgttttcaacgtggcgcactagcacaactggtcaatgaggggaataaatcttaccaagtaatggctgacgccttaggcgtcgccaaagctacgattagctatgagttggaccgagttaaaccttatgatccagaattagctcagcaagatgcagatcgcaaaaggcggaattgcggtcgtcgttcgatgctgacggcagcattagcgactttaattaccaatcacttacgattaacctggtcaccagaaaccattgcggccgcttataacttgagcactgcgtcaatttataattggcttaatcgtggctggctccccttcaaattgactgatctacccaatcggaatgtccgccagcaccgagtgagcgaaaatcgtgggaaatttacaagtgggacttccatcgaacaacggccaacaactgttaatcaacggttagcttttggtcattgggaagtagatacggtgctttctagtcgaagtgagtcacgatcatgtctggttacattcgtagaacgtaagacccgacttctatgggccatcaaagcccctaatagaacggctaaggctctaaacaccgcctttggcaagtttatgggggccttcggtccccaagtaaaatccattactgttgatcgtggtaaagagtttgccaattatcaggccttagaacaggattatcagatcaaagtttatttttgccatccatattcaccatgagagcgaggttccaatgaatattttaatagacggttacgctggttcttcccgaaaaagaccaattttagccaagtaacgactgatgagatcctagcagcacttgaactaattaatcaacgaccattaaaaatacatcatcaacagactgccattgaaagattccgggcttattcggattaaacttgtaatttgccacatcaaaaaagtcgaccgcataatggtcgactttttgatttgttaattttggacgcgtttgacgccggctgcatcgacttggtaacgtgattcttcgagtggtaagtcagcgatttgttgtaaatcaaattctggaaaacgccggctaaccgcaatcgataaaagtcgtttggctaaaacaccgttgtgcgtgagaattggaccatggaagtatgaaccaaatgtgtttttataaacacaaccttcggtgccgtcatcaccattgttgccgtgaccacgtttgatgtaaccaagtggtttttcatccttgcccaagaaagtccggccgttgtgattttcaaaaccgaggtaggtttcgttaaactcacggttttcgatgacaatatcaccgataaaacgattgttatcttggctcaatgtgtaatgatcaagtgcgccgattccaggaatcttgtcgccgtttgcgccaatatagtagtgacctaataattgataaccaccacagatggcaagcataacaccaccgttttcaatgtattcgttgagggctgcttttttgtcgttgaggtcttctgagatgattttttgttcgaagtcttggccaccgccgaagagaacgatatcgtaacgacttgcatcgaaatcttgaccgatactaatgacttctgtttcagtttgaatgccaacttttttggcatagtaatcaaggactaaaatattaccaagatcaccatatgtgttcattaaattgccgtatagatgacaaattcttaatgtctgggtcatactgatagtcctttcttaatataattggcagctgccagcttcttacgtagttgtaaaacagcggtataagttgctaatacataaacatgtttggttggggctgcttcaatggctgccatcgttgcatcgagttctttggtttcgtgtaattgatctgccgtgacaccggctacttttagccggaaagcgatatcgtcaccgcgttcgccaccggtaatcacggttggaatattgtgtttgagtaagtcttcaaactcgccatcccaaatccaactcgtatcaattccatcggcatagttagcgttaagcaacattgcgagtgaaaagtcttctggatcagaactgatcatttgtaagacttggtttaagccaaccggatttttaacgagtaccaatgtgaccgctttgtcttttaattgaatgacttcttgacggccaaagattcgtttgtcttcagtgaaggccttttgaattgctttcgctggaatatcaaagaatcgaccgacactataggctgcaagtgcgttatagatgttgtacatgccgccaattgaaatttcaaacggttcgttgttaatttcaaagtgtgaatttgtggggcgcatctgattgatggcagtgactgcttcgtctaattcaggtcgttggtagccacaattagggcagtaaaacttcccttggctggcataactgataaatttgtaatgaatgatatgatcgcaaacagggcacaaaacgccgtctgtgttgcttggagccatcatttcgccatctggtaagtggttgaatccgtaataaatctttggattaggaagctcaaccgatgaaaagaggggcaagtcagcgttcataatgagggttgcctcaggaacaagtttgacgcccgctagaatcatattataagtcgtgtagatttcgccgaaacgatccatctgatcacggaaaatattcgtcatcacaatcgctttgggcttgatgtagtgacaaaggggttccacattggcttcatcgacttcgaggacggccaattgccgttgtcctttttgaggatgatctgctaaaaaggcggtggtcaacccttgcatcatgttcgagccactcgaattggtcatgatatgatcgtatttttgcttcaacgtctgcacagtgagtgcggtcgttaatgttttaccattggtaccggtaatgataatcacgtcgtagttcttggttaactgctttaacacagcaggatcgaacttggttgcgattttcccggggagggagctgccacctttcataaaggtatgtaaataccaatatgaaaaacgtcctgctgtaattgcaaatgagcttttaattgtcatgcttgccaccctttcaatgttcataatcatagcataaattctcaatttggacgatataaaaacgcatctgcaaataaaataagggaaactttagaatttaatagtggcgaatattgttgcctcgctgattttcaggtatactagattaaaatgtgcttaacataggggtgtttgagagtggcgcaattattttttagatatggtgcaatgaatagtggtaagtcgattgaaattttaaaagtcgcacacaattatgaagagcagaataaatcagtgatcatcctgacgagtgggattgataatcgcgacggggtggggattgtttcaagtcggattgggctcaaacgtgaggcgacaccgattttctcggatacgaatatctttgagttggtacaatcgactaatccggatgcagcgtgtgtcttgattgatgaatcacaatttttagaacggcatcacgtaatcgaagcggcgcaggtcgttgatgatttgaatatcccggtgatggcgtttgggttgaagaatgattttaagaatgaattattcgaaggctcgaaatacttattgctatttgccaataagattgaagaaatgaagaccatctgttggttctgtcgcaaaaaagcgattatgaacttgcgaatgaacgatggcaaaccggtttatacgggtgaacagattcaaatcgggggcaacgaagcatactaccccgtttgtcggaaacactattttaacccaccggtaacacaagagagtgaaaaggaaggctagtcattcatggataaaatgtttgaacaacttgatagtttgttagaccgctatgcggaattacaggaattaatgtctgatccagaagtgatcaacgaaaccagtcggtatatggaattgtctaaagaagaagcgggtttacgggaaattgttggtaaatacacgcgtttgaagactgtcttaaacgacattgcagaaagcgaagaattgttacgcgaatctaatgacccagaaatggaagaattagctaaagcggatttaagtgagttacaagatgaaaaggaacaattagaacaagacatcaagattttgatgttaccaacggatcctaacgatgaaaagaatatcatcatggaaattcgtggggctgctggtggcgacgaagccagtctctttgcaggtgatttgttgaatatgtatcaacgctacgctgaatcacaaaactggcaaactgaaatcatcgatgaaacggctacagaagtgggtggcttcaaagaagttgcgatgatgattaccggtaaaaatgtttattcgaagttaaaatatgaaaatggtgcgcaccgtgtccaacggatcccaaagaccgaatcacaaggtcgtgttcatacctcaacagcgactgttgcagttatgcctgaatatgatggggttgacgtgcagctcgatcctaaggatattcggactgacgtttatcgtgcctcaggtgctggtggtcaacatatcaataaaacctcttcagccgtgcggatgacgcatattccaaccgggattgtggttgcgatgcaagatcaacggtcacaacaacaaaaccgagtgaaggcaatgcaaatcttacagtcacgggtttatgatttctatgaatcacaaaatcaaagtgaatacgattccagccggaagtcagcggttgggtctggggatcgttctgaacggattagaacatataactatccacaaaaccgagtgacggatcatcgaattggtttaacgttaaacaaattagatcggattatgaacggggaattaggcgacgtcattgatgcgttaattctttacgatcaaaccgaaaaattggagcaattacaagatggcacagctcacttatcttaaagccctgaattgggcttttttatttttagaagaacacgctaaagaacgtgaagcagcgcgctttttactactcggtcgtaaacattggacgacgacccaactggtcttgcattatcacgatgaaatgccgactgccgaatacgatcagtatcaagcagacttaaacgcgtttatcgctgatcaaccggcacaatacattttgggatatgctaatttttacggacgcgattttaaggtgacgccggcaacgcttattccacgacttgagacggaagaattggtagaatggatattagatgctacacaaccaaagaaccgaccacttaaagtgttggatgttgggacaggaacgggcgccattgcaattacccttgcctgtgagcatccagaatgggaagtgaccgcaattgatatttcactagaagcgattgctgttgcacaagcaaatgcgcgccaattaaacgcgcatgttaactttatcgtgggtgattttctaaccccagtgatgggccaacagtttgatgtgattgtgtctaatccgccatatattgcacaagatgaacggcatgtgatggatgcgtccgttttgaaatacgaacccgacttggccctatttgcagataataacggcttagcgttttatgaacggtttgctaaagaagtgcgtgcgtatttaaaaccagatgggcagctttatttagagttcggttatcagcaaaaagaggcgatcgttcggttgttcgaacatgaatcgaccgatgtagcggttacaatcaaaaaagatatggctaattggtctagaatggcccgtgtgggttacgatttcaatcggaatttggtatgatgtaaatcagaagtagagtaaggaaggcctataatggaaaccaagagatacacagtagaacagattgaacaagcagcagcagatttaaaagcgggcgaattgatttcatttccaactgagaccgtctatggtcttggggcagatgcgacgaatcctgaagcggttaagaaagtttatgccgctaaggggcgcccaagtgataatccgctaatcgtgcatgtagcaagtgttgcgacggttgagcattacgcagccggagttagtgatcgatttaagcaattagtcgacgctttttggcccggttcattgacaattattttgccgctaaaacatgcggcactagattcagttgtgacgggtggtttaaagaccgctgcctttagaatgccgaacaatgcggtgacgttagacttgattaaagcggccggtgtcccacttgtggggccttcagccaatacatcaggcaagcccagtccaaccactgccgatcacgttttacatgatctaaatggaaagattgccggtgtcattgatgatggtccaactggtgttgggttggaatcaacggtgattgatttaagtgttgcgacacccgttattttacgacccggtgttgtgactcaagaagccattgaacgtgtgattgggccgattatgacaaaccaccataaagttggcgcagctgaaacgccaaaggcaccaggcatgaaatacaaacactatgctccaaatgcacaggtttacatagtgccaacgccagatgaatttccggcggcggttaaatgggccagtcaacaaaatgtgccatttggtgttatggcggttgatacggtgttagggcagttatctgacgttaggtttaaagatcagttctctttaggtgattctgtagtgactgctagtcaacacttgtttgaaggattacggtattttgatttgaatcctgaggttaaaattatattagtgcaaggcttcgcaaaagagggtgtcggattagcgtatatgaatcgcctcgagaagtctgccggccaacaatactttacttcgaaataggcactattttaataggaagaggagtgattgtaaatgattgaacaaactgatccagcaatttacgaattgattaaaaaagaggaacaacgccaggtgcataatattgaactaattgcttctgaaaacattgtttccggagctgttcaagaagcacaaggtagcgtattaaccaataaatatgccgagggttatccgggcaaacggttttacggtggttgtgaatttatcgatcaaattgaatcactcgcgattgaacgtgctaaacaactttttaatgcagaacatgccaatgtacaaccgcactccggttcgcaggctaatatggcagtttaccaagcgcttttagaacccggtgataagattttagggatgaacctcacagatggcggtcatttaacccatgggtcaccgtttaacttcagtgggcaactttatcacttctatagttatggcgttgctgacgataacgaacgaatcgattatgatgcgctcgctgctaaagcggatgaaattcatcctaaaatgattgttgcaggggcatcagcatacagtcggacaattgacttcccaagattacgcgccattgccgatcatgtcggtgcctatttaatggtcgatatggcacacattgctggtttagtggcaactggtgttcatccaagtccagtgccatatgccgatgtggtgaccacaacaacgcataaaacgttgcgtggacctcgtggtggaatgattttgtgtaaagcagaatatgccaaagcaattgactctgccatcttccctggtattcaaggtggaccgctcgaacatgtcattgcggcgaaagctgttgcatttggtgaagatttacaacctgaatttacagcatatacaaaacaaattgtggccaatgcgcaagcgatggctgccgttttcgaacaatctgacttagtacgtgtggtttcaggcgggactgacaatcatttaatgttactcgatttaacgcagagtggcttaaatgggaaggaagtccaagcatttttagatagtgtccacattaccgttaataagaataccattccttttgaaaaattaagtccatttaaggcaagtgggattcgaattgggaccccagcaatcacatcgcgcgggtttaaagaagcggattgtgaattgattgcgcaattaattttagaagtgattgaaaaacacgatcaattagacgccatgacgcgcattagtgcagatgttttagcgttgacagatcgttttccaatcacacaagctaaatttttagattaattaatgaataccgctagttttttgatgctatttacgctacaatagtaaacagaattttacgcggaagggagagtgactcggagaaggttttctttggagtcactctttttttgcgaaaaaaatttggactaaattcattgaatagaataggggcaaagtaaatggcaaaattcacagtattaaatcatccgttaattcaacacaaattaacgattatccggaataaggatacgggtactaaagttttccgcgaagtcgcaaacgaaatcgcagaattaatggtttatgaaatcacgcgcgatttagcaatggaagacgtagaagttgaaacaccaatgggacctgcaattgaaaaacaattgagcgggaaaaaattagccgttgtgccaattctgcgtgcaggtcttgggatggttgatggcgttttagaattaatcccagccgctaaagttggtcacattggtatgtaccgtgacgaaaaaacattacaaccccacgaatactttgttaaattaccaacagatatcgatcaacgacaactattcatcgttgatccaatgcttgcaactggtggctcagcaatcatggccatcgatgcccttaaaaaacgcggcgcaacgtcaatgcgccttgttgtactagtggctgcacctgaaggcgttaaagctgttcaagaagcccatccagatgttgacatctatgcagctggtcttgatgatcatttaaacgaggatggatacattgttcctggtttaggggatgcaggcgaccgtcttttcgggactaaatagccattaattaggtaccgataataaaagcgcgcaacacttgattttcttgtgttacgcgtttttttgttgccaaaagagcaacggttaataagtttaatctttttatatgataatatttatggtatttgagtgcattgacaaaaaaataattagaaattagttagtatttgctttgtacttttaatttaatggtggtattatcatacttgtattgcggtgatgatttatgcttaatttttctacataaatattgctgtttttaggttcgttgtgcaactcgcgtagacgtagtcattgatagagtggaatcaacaaataagcctaagggaggagggaattttgtggatgataaatatcccattattagcattttgggaattcgttttaatttagcaaactgtctatcggtcttagtaagtgcagttttggtttttgcactcgttttctttttatcaagaaaaattgcgcttaaaccgactaaacggcagaatattttggagtggatcattgattttacgaacggaatcgttaaaagtgcgatgcccggtgaagaaggtaaacaattttacttatttgcattcgtcatgttcatgttcgtatttatcagtaatcaacttggtttgattcttcaaattaaggtacatgatgtaacttggttgaagagtccaacggccaatccgattatcacgatgtcgcttgcgatgatcgtcttagtgattgcgcactactttagtgttgaacggttagggtttggtaattacatgaagagttatattaaaccggtaggatttttcttaccaattaatatcatcgaacaatttaccaatttcttaacgttgtccttgcgtttgtacgggaacatttttgcgggtgaagttttactaagtttattagttaaaatggccttctcacatggaccagcaacgatgcttgtgacggcaccgatccaaatggtttggcaaggattctccgtctttatcggggcaatccaagcatatgtatttgtaacattatcgatagtctatatttcagaaaaaattgaaatggaagactaaaaattaggaggaaaaaacatgaactatttagcagcagctatcgcagctggtttagcagcattcgcagcatcatatggtaacggtaaggttatctcaaaaacaatcgaaagtatggcacgccaaccagaattatcagcagaattacgctcaacaatgtttatcggtgttgggttgattgaagctgttccaattctttctatcgtcgtttctttcttgatcttatttagttaatccgagtgaatctaaattttcgctttaaaaattagtcagtaagtcaaggaaggagtgtcaatagatgtttagtaatttaatcgttggtgcttctgaagcctaccttggagattcacttttcgtattagttgtctttatcattttagtcgctttagttggtaaatttgcgttcggacctgtttcaaaaatgatgcaagctcgttctgacaaaattacaaacgacttagataacgccgctcaatcacgtgaagatgctgccaaattagcagcacaacgcgcaacagagttgaagaattctaagtcagaagcagttgaaattgtgaatacagccaagcgaaatggtgaaaaacaacgcgaaggcatgatcacacttgctcaagaagaagtccaaactttaaaacaaaatgctaaaaaagacatcgaacaatctcgtttagatgcgttaaacagtgtgagagatgatgttgctcaactatctattgaaattgcttctaaactcattaagaaagaattgtcagttactgatcaaaagtcattgatcaattcctatattgaagggttggacaagcaaaatgaaactagataaatatgcagtcggacaacgctatgcaaaggcattattttcccttgcagaacaagagcaacaatttgaaagtatccatgaagagatacaagcactcgagactattttcaatgacaacccaagattgggtgcagttctgactgatacgactttatctggattgaaacaacgtgagcttctaaagagcctttccggtgaatttagtacactcatgcaacactttttaagccttgtttttgactatcaaagaatggctgagatgccatacattattgcggcctacgaagatctttatgatcaaaagatggggattgcacacgctaaggtaacgtcagccgttgctttagatggtgatcaaatcgcaaagattagccaaagctatgctaaacgcgaaggtctcaatcaggtcttagtggaaagtatcgttgatccagatattattggtgggattgtactggaatcgaatcacaaggtgatcgatggcagtgttaaacatggcttagatcaaattaagtcattactattgaaatagtcaatcgttgataaagaggtgaacctgatgagcatcaaaactgaggaaatcagtgcattaattaaacaacaacttgcaaattataatgaagatttagccgttgaagaagtcggtactgtcacttatgttggtgatgggattgcacgtgctcacggtttagaaaacgccctttcaaatgaattgctagaattttctaacggttcatacggggttgcgcaaaacttggaaaccaacgatgttgggattatcatcttaggtgaatatgaaaacattcgtgaaggtgaccaagttaaacgaacaggccggattatggaagtgcctgttggcgatgctttaattggtcgtgttgttaatccattgggtcaacccgtggacggcaaaggcgaaattaaaacggacaaaactcgtccaatcgaaaagaaggcccctggcgttatggcacgtcaatctgtttcagaacctttacaaacaggtttgaaagccattgatgctttggtaccaatcggtcgtggtcaacgtgaattaattatcggggatcgtaagactggtaaaacatctgttgcgattgatacgattattaatcaaaaagatcaagacatgatttgtatttacgttgcgatcggtcaaaaagaatcgaccgttagagcgcaagtggaaaccttacgtcgttacggcgctatggattataccatcgttgtcgaagctggtcctagtcaaccagcaccattactctacattgcaccatatgctggtgcagcgatgggtgaagaattcatgtataacggcaagcacgtcttaatcgtctatgatgatttaagtaaacaagctgctgcttatcgtgaaatttcattacttttgagaagacctccaggccgtgaagcttaccctggtgatatcttctacttacattcacgtttattggaacgggctgctaagttaagtgatgaattaggtggcggttcaatgactgctttaccaatcatcgaaacacaagctggggacatctcagcttatatcccaactaacgttatttccatcactgatggtcagatcttcttggaaagtgatttattctattcaggaacacgtccagcgattgatgctgggtcatctgtttctcgtgttgggggcgcagcgcaaacgaaggcgatgaagaaggtttctgggacattacgtcttgatctttcatcataccgtgaacttgaagcctttacgcaattcggttcagacttggatgcggcaacacaagcgaaattaaatcgtggtaaacggactgttgaagttttgaaacaaccacttcacaaaccattaccattcgaacaacaaacaacgattctttatgcattaacacacggctttattgatgacgttccagttgacgatatcatgcaatatgaaagtcaattgagcgattatcttgaaagtaacgcaaaggacttgatggacactatccgtcaaaccgctgcattgccagatacagataagttagatgctgctatcaaatccttcacagaaggttttgtcggcgctgaagctactgctgacaatcaagactcaggacagtaaggggtgaattaattggctgaatctttaatggatatcaaacgaagaatcgcctctactaaaaaaactgggcaaattacgagtgctatgcaaatggtctctggtgcaaaactttctcagattgaaaaaaattcaatcgcttatcaacaatatacgaataagattcgagaaatcgtcacgcatttggctgcaagtcaattaattgcaagtgcacgtcaaaaaagtaccgctaaagcagcagaagctactaacggtacttcacagaaatcattgcggcatgacattacgttaagtaatttgttagtggaaagaccaatcaaaaagaccggttatttggtcatcacgagtgatcgtggattggttggcgcttataacagctcaatcttaaaagcaatggttgaaatgatttcagaaaaccacaggtctgccgatgaatatgctattttagccgttggtggcactggtgctgatttctttaaagcacggcaaatgaacttatcctacgaatatcgtggtgtaagtgatgtgccatcatttaatgaagtccgtgaaatcatcaaaacagctgttgcaatgtatgatagcggcgtgtttgacgagttgtacgtttgttacaaccaccatgtcaactcactgacatctgcttttcgagctgaaaaaatgctacctattaccgacttggatgtttcagaagtcactgataaagatcaagaatacatcacagaaccttctgttgatgatgccttagatgccattctaccgcaatacgctgaaagtttgatttacggcgcactacttgattctaaaacagctgaacattctgcttccatgacggcgatgaagagtgccactgataatgctaataatttaatttctgatttatcaattaaatttaaccgggcacgtcaagcacagattactacagaaatcaccgaaattgtcggtggtgcggcagcattagaataagaaacgcgggaggaaaataacaactatgagtatgggaaaagttgtccaagttattggtcccgttgtcgatgtcgaattttctttagatacgactttaccagatatcaataatgccttggttgtcaacaaagggaacgacgaatctgtcgtcttagaagtggcacttgaattaggtgatggggtaatgcgtactatttcaatggaatcaactgacggtttacgtcgggggatggctgttgaagacactggtcgtgcaattaacgtaccagttggtaaagaaactttaggacgggtatttaacgttcttggtgaaacaatcgatggcggcgaagaatttcctgcagattttagacgggacagtatccaccgttctgcacctaaatttgaggaattaaatacaagttcagaaattcttgaaacagggattaaggttatcgatttacttgccccttatttacgaggtgggaaaattggtttgtttggtggtgccggtgttggtaaaaccgttttaatccaagaattaatccataatatcgctgaagaacatggtggtatttctgtctttactggtgttggtgaacgaacacgtgaaggtaatgacttatactttgaaatgaaagaatcaggcgttttggaaaagacagcgatggttttcggtcaaatgaatgaatcacctggcgctcgtatgcgagttgccttgactggtttaacaattgctgaatactttcgtgatgttgaaggccaagatgtgttattgttcatcgataacattttccgattcactcaagctggttcagaagtttctgccttattaggacggatgccttctgccgttggttaccaaccaacattggcaacagaaatgggccaattgcaagaacgaatcacgtctactaaaaaaggttctgttacatcaatccaagccatttatgtgcctgctgatgattatactgatcctgcgcctgcaacaactttcgcgcatttggatgctacaactaacttggatcgtaaattaacacaacaggggatttatcctgctgttaacccactagaatcaacttctagtgctttggatccagaaattgttggcgaagaacattacgaagttgcttcagaagtgcaacacgtcttacaacggtatcgtgaattacaagatatcatctcgatcttagggatggatgaattatctgatgatgaaaagattatcgttgcgcgtgctcgtcggattcaattcttcttatcacaaaacttccacgttgccgaagccttcacaggccaagccggctcatacgtgccagtaaaagatacagtggcaggcttcaaaggcatcttagcgggtgactatgatgatgtccctgaagaagcattccggcttgtcgggaatattgatgctgcattagcaaaagctaaagaattgggttatacaccatccgaacaagaaacgaaacaagcttagaaaggggcgttaatgatggcagaagaacaaaaggtattaaccgttaatatcgtgaccccaagtgggattgtctatgatcaccacgcaacattgttggttgtaccagcgatggccgggcaacttggtattatggctaatcatgagccaattattacccctttagaaattggtgagattcgcgttaaacggactgatgatccagcacgtgaagacgcaattgcggtcaatggtgggttcatggaagtgagccataacgttgcttcaatcgttgccgatagtgctgaacgggcgcgtgatattgatattaggcgtgcgcaaagtgccaaggaacgtgctcaaaacgcaattaaaacagcgtccgaacataatgatactgacgaattacgccgggctcaaattgcactgcaacgtgcgataaaccggattaacgttaagaatcacttattgtaggattcaaaaagccttaaacctgaatggtttaaggctttttttgtttcttaagattcagtctggtgggcagacaaatcctatttcggtatgttacaatgtttgcatatcacaaaaggggcgttatttaagtgcaatcaatcgggttacaggcagttatttcaattattagccatattggttttattttaatcagtttttatggcttacaatcaatccggtttgagcaatttttcaaaccgaatcatatccgtcaagtacagattgtcatagtatttctcgctattgtgatgggctacaccgttagccaattctttttagaaataatcgcgcaggctaaaaatgtgatttttttagtcccataaactagcagtcttattcggagggaaactcttggaaaaattgattatacaaggcggtcaacgattagttggcgaagttcaaatcgaaggcgccaaaaacgcagtattaccaattatggcggctgccttactagcaaccgacggacccgttcaattaacgaacattcctattttatctgatgtcttcatgatgcaagatgtattaaagagtttagatgctaaagttgagtttgatgaacaacggaaccaattaacaatcgatgccagtggtgatttgaattttgaagcagcttttgaatatgtttcaaaaatgcgtgcttccatcgttgtgatggggccgttattagcgcgcttaggtcacgcacgagttgcgatgccaggtggttgtgctatcggttcgcggcctgttgatttacatttgaagggttttgaagcacttggtgcaaccattcatcaaaatcatggttacattgaagctaaagcagaacgcctagtgggaactaatatttacttagattttcctagtgttggtgcgacacaaaacatcatgatggctgcgacaatggctgaagggacaacggtgattgaaaacgttgctcgtgaacctgaaattgtggatcttgctaatgtcttaaacaagatgggtgcgaacgtttttggcgccggaactgagacaattcgggtggaaggcgtaaccgctttacacgggacggatcacagtatcgtgcaagatcggattgaagccggaaccttcatggtagccgctgcggcaacacaaggaaatgtcttgattaaagaagcgattgctgaacacaataaaccactcctatcaaaattagtggaaatgggtgcggaagtgattgacgaagaagctggtgttcgaattattggtcccgctgaattaaaggcatgtaatatcaagacgctaccttatccaggctttccaactgatatgcaagcacaaatgacgacacttcaattacttgctaagaagacgagtgttatgaccgaaacggtatttgaaaatcgtttcatgcatttggaagaactccgccgaatgaatgcggattatcaaattgaaggtcaatcagttgtgctttatggcgatacacatttcaatggggctgaagtggctgcaaccgatttaagagctgccgcagcacttgtcattgctgggttagtagctaatggtgaaacgttggttacgaaccttcaatacatggaccggggttactatcatttccatcaaaaattacgggcacttggggcacatattagtcgagctgattttgatgctgccggtcaccggattaaacaagcaaaacgtgcataaaacagactggcggcgcctgctatttcagcggacgtcgcttttttattttgccaaatcaggatactaaaggtacctgtcttatggtataatgatttactgaatatagttctcggaaggagcaacaccaaatggctaaagatatcgggattgacttgggaactgccaacgtcttaattaacgttaagggaaaaggcattgtcttaaacgaaccttcagttgttgcgattgatacccaaaccaaaaaagttttagcagttggctcagaagcgtatcggatggttggccggacacctggcaatatccacgctgtccgtccattaaaggatggggtcatcgctgatttcgacattacagaagaaatgttagcgtattttattaataaattaaatgtaaagggcttcctatcaaaacctaatattttgatttgctgcccaacaaatattacatcaattgaacaaaaagcaattgttgaagctgctgaaaaatcaggtggcggcaaagtcttcttggaattagaaccaaaagtcgcggctgtaggtgctggtatggatatttttcaaccacgcggtaacatggttattgatatcggtggtgggaccagtgacgtcgctgtgctttcaatgggtgaagtggtcacaagtcgttcattgcgtcttgcaggcgataagatgaatagtgaaattgccgcatacgttaagaagaaacataatctattaatcggcgaacatacggctgaaacaattaagttaacaattggtaacgtttggcatgccgatgcgagtgagtcacttgagattcgtggccgggacatggtaagtgggttgccacaatctgtctcaattagtgcagatgaagttgaatcagccttgcatgaaacaatgatggaaattattgcggctgccaaagaagtgttagaagtgacaccaccagaattatctgcagatattattgatcggggaatcatgttaacgggtggcggtgctttattacgcaatatcgctagcttattctcagaacatttgaaggttccggtggtcttagcagaaaatccattggatgctgttgctttagggactggcatcttattagataatattgaacataaacgcgcttattaagccgcattctattaaagaaggattgtgattgtgtgtatcaatcaaattttgacgaacacgtcaaacccgttttaaagaaaattttattggttttcgtgctcataattattgcgttattagttggtcagatgattggttttgcaattggcggccagaatccatttgccgttttcttgcctagtacatggagtcatattattaatttcttgcagtagcatgcgctaaagtgaggcagataaattgcggaaaatattgattggattggtccgtttctatcagaagggaatttcaccattattaccaccgagttgccgatattacccaacatgttcgagttacatgattcaagcaatccaaaaacatggtgctattttgggtttaatcatgggcatcggtcgtatattgcgttgtcacccgtttgtacggggcggctatgatccagtaccagatcatttcaccgttttgcgcaatcgacagcaagacgagtcacaaaagtaagtcaaagaagttaggggttcaacataactatgtcaaaaaaagaacaaaaaattactgtcacaattgatgacatcaaacgtaatggtcaagaaatgacaagcgtcatggtcggcaaaaatgaaattggcgtgattgtagaagatagcgctaagaaacgttttgaagcaactgttgaagggactggtcaaagtatcattactaagacccacgacgatgcagttaacgaattactacgggagtaccacttacaccaaggttaattcttaagaattaattagaattacagtaacccggcagaattctggccgggttatttatataatgagagcagaattgattgaaggagacttagcatgccaaaggaagtagaaacaacagaagattcctcgcgagttgattatggaatcgtcttttcagtctttatgctagcgttgattggcttgatgtcaatctatgtggcaacgtcacatgatacatcaggtgcgagttcaactcgagccgttattatgcaagctgcatggtacgtgattggtggaattgcgattgtcgcaattatgcagtttgattcagaacaactatggcggattgcaccactggcttatgggttagggattttcctcttgattgccgttttaatcttttataatcgggcagtcgccttgcaaactggggcaaagagttggttctctcttggaccaatctcatttcaaccatctgaagtcatgaaaccggcatatattttgatgttgggcagggtcgttactcaacacaatacggcttatccagaacacacgattaagacggattggatgttacttggacgaatgttactatggacacttccagtgatggtcctattgaaattacaaaatgactttgggaccttattagtgttcgttgccatcttaggtgggattgtgcttgtctcaggtgtgacctggaagattttagccccagccattgctgtcttagtcgctgttgggggcacggcccttacactagcggcgacgacccctggccgggtaatcttgacgcatctgggctttaaaacgtaccaattcaatcgaattgatgcctggctgcatccttttgataatactgccagtaccagtttacaattatcgcagagtttaaaagcgattgggtctggtcagctatttgggaaaggcttcaatcaagtgcaagtccatgtgccagtacgtgaatccgatatgattttctctgtcattggtgagaacttcggctttgtcggttcatgttttgtgattcttttgtacttcttgttgatttaccaaatgattcgggtcacatttgatacgaagaatgaattttacgcgtatgtctcaactggggtcatcatgatgatcttattccatgttttcgaaaacattgggatgagcgttggtttattaccattgacagggattccattgccgttcatctcacaagggggctcgtcattattggggaacctaattggcgttgggtttatcatgtcgatgcggtaccattataagagttacatgttcagtgaagctgaagatactttctaggagtgaatgacggatgacgatgaataataatgattatttttggacagaggaaattgcagcatcgattagaagaattgggatcaccaaagccgcacaaaatgagtttgggttaatcaagtttgttgatgttccaatcgtggggcaaaaattgacggctaatgaaaccttagtggccattgaagctgagaagatggtacaagatcttgacagtccactagctggtgaattagtaaacgtcaacacaccgttagctgataatccggaattattaaatgcagataacgaaaaagatgcgtggattgctgacattcgggtcgattaggccattacttaaacaataatctgatttttttgaatagtcttgcttgacttttaattgaactttaattatgataagtactacttaatacaagcgatgaaaagatgagtaatttagtcagtagcattttaagagagtccggtcaggtgcaagcggataatgtgaaagctagatgaatatggtctttgagcaattcatttggtaaggtttaactgagccgaatgcgggggttgcccgatatagcgaacgagtatcaatatcaatcgggtactttgtaaggcgattactgtgaggtaatcgtaaattaaggtggtaacacgcatttagcgtcctttctctcatttatttgagaggaaggatttttttttggcattttttaaaagaagagggagcgattagtatgttgacattaaaacaagtgggtaaaacctttgagcgagaacaaaaaacattcgccgcactaacggatgtctcgttgaacattgaagcgggcgaaatctacgggattatcggttattccggcgctggtaagagtacgttgatccgactcttgaatggacttgaaaagccaacgactggggatgtgctcgttgagggccagtcaattgtggggttgagcgaacaagcaatgcggccgattcggcagaaaattggcatgattttccaacactttaacttactctggtcaaagacagtgttagaaaacatcatgttgccactaaaattagccggggtacctaaggcagaacgacaaatcaaagcccgcgcattattaaagattgttgaattgacccatttagaagcggcctatccaagcgaactatcgggcggtcagaaacaacgggtcgcaattgcacgagccttgattagtgacccgaagattctgttatgtgatgaagcgactagcgcccttgatccgaaaacaacgaattcaatcttaacgttactggctaagattaatcgtgaaatggggattacaatcgttcttgtcacccatgaaatggatgcggtgcggcggatttgccaacgaattgcggtcatggaaaatgggcggttaatcgaagaagggactgtgcacgaaatctttgaaaaaccacaaatggctgcaaccaaggcatttgttgctgaatccttagtggtgtcgccaagtgaaacggccgcttcgattgatcaactgttagaacgggttccaaatggcacaatcgtccaactgcgatttaacgaagaacaatcgagtcaaccggtgatcggtcgcttgatgcgtcaatacccagcagtcgaaatcagtgtcatcagtgggagtttacaacaaaccattaatggcgcacttggctatttatacattcaaattcaagctaatccaagtgatttaaaggcagtccttgcagaattagcacaacaaacaatcgaagttgaggtggtacgtcatggataacgtaaacggatttcaatcctattttcaatttaagcaagtgaactggccaagtatgtggcaagcaacttttgaaacagtttggttaacaattgtcagtgttttattggtggcagttcttggattcgcactcgggttagttctttatcaaacaaacgcgagtggtggtcgagtgaatcggctgttgaatggcattgtggctttattagtgaacgtctttcgttccattccattcatcattttaatcgtcttgttgattccattgacaaaaggcttgatgggcacgatgattggcccgaaagctgcgattccagcgttaatcatctcagccgcgcccttttatgcacgactcgttgaattagcttttcgggaagtcgatggcggtgtgcttgaagccacccgttcaatgggcgcttcaaaagtccaaatcgtctggcaagtccttttaccagaaagcatgccggcgcttgtttccggcttaaccgtcaccgcaatttcacttgttggttataccgcaatggcgggggtgattggtgccggtggactgggaaatcttgcttaccaagatgggttccaagctaaccaaaatgcgattacgttagtcgcaaccgtcattattttaatcatcgtcttcatttgtcaaaaaacgggcgacttggttgttcaacacattgatcatcgttaatttaaaaggaggagttttcatgaaaaaacgcagtttaggattattagcagcagtcttcttattagcgggcgcacttgccgcttgtggtaacaaagaagcgaagtcagacagcaacacaatcgtcgttggggcatccgcaattccacacgccgcgattttgaaacacgttcaaccggagttgaaaaaagaaggcatcaacctcaaagtaaaagtcttcagcgattatgttttacccaataaagctttagcgagtggcgaattagatgcgaactactaccaacacaaaccctttttgaagaaggcgaataaagataacggctacgacttagtcagtgttggcagtattcacttagaaccgctcggcttatacagtaaacaagttaaaaaattgagtgatgtgaaatcaggtgcgaaagtattagtttcaagcagccagccagactggggccgtgttttaacaattttaaaaggcggtggcttaatcaccttgaaatcgggcgtaaatgctgaaaacgcaacgtttaaagacatcgctagcaatcccaaacacctcaagtttgagtacacattcgaaccaaaactcatgcctgaacttttgaagaatgatgaaggcaccttagtggcgattaactcgaactatgctgtgcaagccggtctcaaccctgaaaaggatgctgtggcccttgaaaagcaatcttcgccatttgccaacattgttgtgacaaataaaaaagaccgcaataacccagctatcaagaagctcgttaaagcgctcaaatcaaaatcaacgcaagaatggattaagaataaatggcacggcgcagtgttaccagttgaataatgatcaaagacaagtcattaagacttgtctttttttgctgttagcatgtgtaattcttaatttaattggaaaaagcgggttaaattggatatactatcattgaatataaacttttagggggagtaagaatgagtcgtccgtataatattggtttagatattggtactagttcaattgggtggtcagtggttgatgaccaaagtaagttggtcagtgtaagaggtaaatatggttatggggttcgtttatacgatgaaggacaaacagccgcagaacggcgcaactttagaacaacacgtcgccgattaaaacgacgtaaatggcggttaggattgttaagagaaatctttgaaccctatatcacgccggttgatgatacttttttcttgcggcaaaaacaatcaaacctaagtccgaaggatcagcgaaagttacatccacagacaagtttatttaatgatcgaacagatcgggcattctatgacgattatccaacgatttaccatttaagatataggctaatgaccgagaaacgtcaatttgatattcgcgagatttatttagcgatgcatcatattgtgaagtatcgcgggcactttttaaatgaagcgcccgtctcatcctttaagagtagcgaaattaatttagtggctcattttgacagactaaacacgatttttgctgacttgttcagtgaatctggctttcaactagagacggataaattagcggaggtcaaagcgctcttattggataatcaacaaagtgctagcaatcggcaaagacaagcattatcactgatttatacgccaagtacgaataaggcagttgaaaagcagaataaggcgattgcgacagaattattaaaagcaatcttggggttaaaagcgaagtttaatgtgcttactgggatcgaagccgaagatgttaaagcatggacactcacttttaatgcagaaaactttgatgaagaaatggtcaagttagagagtagtcttgatgataatgcccatcaaattatcgaaagcctacaggaactttattctggtgttctattggcgggaatcgttcccgaaaatcaatcattgtcgcaagcgatgatcacgaagtatgacgatcatcaaaagcatttaaaaatgctaaaagcggtacgggaagcgttagcacctggagaccgacagagattaaagcaggcttatgaccaatatgttgatggtcaagaaaatacgaaggcctattcgaaggaagatttttacggagatatcacaaaagccttaaagaacaacccagatcatccgattgtgagtgaaattaaaaaattaattgaacttgatcaatttatgccaaaacaacggaccaaagataatggggcaatcccgcatcaactacatcaacaggaattagaccggattattgagaaccaacaacaatactatccctggttagcggaacttaatcccaattctaaacggcaaacagtcgctaaatataaattggacgaattagtggcctttagagtaccatactatgtggggcccctgattacggctgagcagcaacgacaaagctccgatgcgaaatttgcgtggatgattcgtaaagcagaaggccggattacaccgtggaacttcgatgataaagtggaccgtcaagcatccgctaatgaattcattaagcgcatgacaacgactgatacttatttattggctgaagatgtactccctaaacagagcttaatttatcaacggtttgaagtgttgaatgaattaaacggacttaagattgatgaccaaccgattacgacggagttgaaacaagcaatatttacggatttatttatgcaaaaaataagtgtaacagtgaaaaatattcaggattacttggtatcacaaaagcgctatgcaagtcgtcccgcaattactggtctatccgatgagaacaaatttaatagtcgattaagcacgtatcatgacttaaagatgattgttggagatgcggttgatgatgttgataaacaagccgatttggaaaaatgtattgaatggtcaacgatttttgaagacggcaaaatatatagcgtcaaattgaatgaaatcgattggttaacggatcagcaacgtgtgcaattagctgctaaacgctaccgcggttggggtcgtttgtcggctaaattattaacgcaaatcgtcaatgcgaatggacaacgaattatggacttactctgggatacaacggataacttcatgcggattgtgcactctgaagactttgataaattaattactgaagctaatcaaatgatgctagctgaaaatgatgtacaagatgttatcaatgatttatatacgtcaccacagaataaaaaagcgctccgccagattctgcttgttgtcaatgacattcaaaaggccatgaaaggccaggcgccagaacggatattgattgaatttgcgcgcgaagatgaagtgaatccacgactttcggtgcaacgtaagcgccaagttgaacaagtctatcaaaatatcagcaatgaattgctaaataatactgaaatcagaaatgaacttaaggatttatcgaattctgcattgagcaatacgcgcttattcttgtacttcatgcagggtggtcgggatatgtatacgggtgattcgttgaatattgatcgtttatcgacgtacgatattgatcatatcttgccacaatcgtttattaaggataactcactagataatcgggtattagtttctcaaaaaatgaatcgtagtaaagcagatcaattaccgactgactttacaagtgtcgaacttggacaaaagatgcagcttcagtgggaacaaatgttgcgtgctgggttaattactaagaagaaatacgataacttaacgttaaatcctgatcacatcagtaaatacgccatgaagggctttattaatcggcaattagtagaaacacgtcaagtcattaagttagcaacgaatttattgatggaacagtatggtgaagataacattgagttaattactgttaagagtgggttaacccatcaaatgcgaacagaattcgattttccgaagaatcgtaatctaaataaccatcatcatgcattcgatgcttatctgaccgcattcgttggtctgtatctattgaagcgctatcctaaattaaaaccttattttgtatacggtgagtatcagaaggcaagtcagcaagataagtggcgtaactttaattttttaaatggtctaaagaaagacgaattggttgatgaaaatactgaagcggttatttgggataaagaatccggtctagcttatttgaataaaatatatcagtttaagaagattctagtgacccgcgaagtgcatgaaaattcgggagcgctatttaatcaaacgctctatgcggctaaagatgataaagcaagtggtcagggcggcaagcaattgattcccgctaaacaagatcgaccaactgcactctatggtgggtactcagggaagaccgttgcctacatgtgtattgtacgcattaaaaataaaaagggcgatctctataaagtctgtggtgttgagacaagttggctagcgcaacttaaacaactgacggatgaagactcacaaaaggcattcttaaagcaaaaaattagtccgcaatttacaaaagtgaaaaaacaaaaaggaacgattgtgaaagtggtcgaagactttgaagtcattgcaccacatatcctaatcaatcaacgtttcttcgataatggtcaagaattgacattgggctctgcgacgtataaacacaacgagcaggaactgattctcgataaaacggctgttaaattattaaatggcgcgctacctttaacacagtctgaagaactcgctgaacaagtttatgatgaaatcttagatcaagtgatgcactatttcccactatatgatactaatcaattcagagctaaattatctgcgggtaaagcagcctttatgaagttgccgtggaagagtcaatgggatggtaataagatggtgcaggttgggcaacaagttatattggatagagttctaattggattgcatgcaaatgcggcagttatcgacttaggggtgttgaaaataagtacgccactaggtcaaatgcagcaaccatcagggatttctctttcacctgatacccaaattatctatcaatctccaaccggtttattcgaacgacgagtagctttaagggatttataaataaataaagctagcctgtcattagtgtaatgatgggctagctttttggtttgaaggcataaaaaaaggcctcataagaggctcagaatagaaaacttggtccgaagaccttgtttgattttaactcagagtatcaaatcaatgagtatttcgattgagtgtatcaagctcaacaacagcattatagcatgttatcattttgaaaacaaggatgtagggggtaaatttttatgagttggcgaacagttgtgatttcacaacatgcaaaggtttcttattctggacggaagattgttgtccagacaaaagatgcaacacaccaagtaccaattgatgatatccaaattttgttagttgcgactacccaggccgttttaacggcatcggcaattactgagttgagtgaagctggcgctaagattatttttacaggtaaagatggtaatccaacttgcgagacaattgcggattatccaggaaatcgtagtctcgcgtcgattcaacaacaggttgaatggggaacggggttgaaagaaaccttatggacggcgattattcaagccaaaatagcgatgcaaattcaatgtgcacaattgttaggaaaggatattgaagacttaacaacagaagctgatgcaatggtatttgctgatcgaacaaatcgagaagccgtgattgcgcgcaagtattttcagttagtttttgataaagactttgttcgaacggagtacagtcccattaatgcagcccttaattatggttatagtttgttgttatcagccgttaatcgcgaaattgtttgtaatggctatttaacacagtttggcattcatcatcacaatggcgtcagtgattttaatttgggttccgatctaatggaaccttttcgaccagtgattgattattgggtggcacatcaaaagtttaatgaattaacccctgatgttaaatttggtttggtggagttactgaatcttgagctagaatataatggacagatcacaattcttagaaacgcactcactaaacacgtacagaattgtttgaaattcatgacaactccgaaagaagagtttgaagtaaaggtggtaatgactcatgaggtaccgaataatgcgcttattagtcatgtttgatttaccagttgaaacgagcgaggatcgcaaggcataccgtcattttagaaaagcgctgcttaacgaaggttttttaatgattcaatattctgtttatgttcgagtttgtgtcagcaaacaatcggcgcagtttatcgagaaccgaattgctggctttactccgcctgcaggcttagtacaaacgttgatggttactgaacaacaatataataaaatgcatttcttagtgggcgaatcgagtgatgacgtccgtaattctgctgagaggacgttaattttatgaacattactttttatccataccacccctttagcgttcagaataagaaaataacggtttgcagtacaagtagtccagaagtgtataccaaactcattattggaatgtccggcgcacaagagaccgttaaatttagcaatgatcaatacgaattaatggattattcaaaggctgttatttggggtggggatgtggcagcaattaatttgaatcatctatttcaaaatcggttgattaaaaaattcgccgccgacttaacggatcagcagcgccagaaattaactcagttagatagtgagattcgttcaacgattttggatgcggcctttatgtatgaattgaccttagatgtcaatcaggaatgggatcttcaaagaatgattaagttctataatttacaattttcgactgtcgtccaacatgacccatatggtataattgagagtatagtacagacagcagtagagttaaatgaatcaaaaataatcacgttgatcaacgtttcgcactatctcagtatcaaccaatttaatgaattggtgaggttggtggcgacattgaatgtgaaactctttctcattgaattttcagaagaggttaaatctgatcagtaccagaaatgttattattatcacatcgataatgattatgtcgaatggcgctatgaataaaatgaaattctgatgaaaaaacgacggttttagaagagtatcaaatcaatgagtagttcaactgcaaagtccgacagcgttaaacaagcgcggttttagaagagtatcaaatcaatgagtagttcaacaaataaaagactcagtctcgaagacaaagtgttttagaagagtatcaaatcaatgagtagttcaactttaaactagcaataaaaggtaactaattcgttttagaagagtatcaaatcaatgagtagttcaactgggctaaacaggaggaaccatcatggcaggttttagaagagtatcaaatcaatgagtagttcaacaatgtgatcgtgatcccttgtatcttccgcgttttagaagagtatcaaatcaatgagtagttcaacccgcgtaaccaatattggtggcttctttaagttttagaagagtatcaaatcaatgagtagttcaacacaattttaaaaaaagattgtttgtaactagttttagaagagtatcaaatcaatgagtagttcaaccgttagaacaagctttaaagggcattgctagttttagaagagtatcaaatcaatgagtagttcaactcacttaaaaagcaaagatgttttcgatatgttttagaagagtatcaaatcaatgagtagttcaactttaaaagtctatgactatcagtgacaacggttttagaagagtatcaaatcaatgagtagttcaacagccaatcgttttctaagatgtaacgcccggttttagaagagtatcaaatcaatgagtagttcaacaattcgttcaaaataactaaaaaattacttgttttagaagagtatcaaatcaatgagtagttcaaccggtcgaaatcgaaatcagtttccatttttgttttagaagagtatcaaatcaatgagtagttcaacactaattgctactgaataattattattagggttttagaagagtatcaaatcaatgagtagttcaacaaacccaggttgctaatagtgctgtgggaagttttagaagagtatcaaatcaatgagtagttcaactaaaaccgcccaagtcttcactgtcacggtgttttagaagagtatcaaatcaatgagtagttcaacttcaacattaaatgttgtatcagacgcatcgttttagaagagtatcaaatcaatgagtagttcaactttaataaaaaggcggtaacagcatgaaaagttttagaagagtatcaaatcaatgagtagttcaacgatgtcgatcagttgcggttagtcctgaaggttttagaagagtatcaaatcaatgagtagttcaactgggtgtcacgttcggtatgaagattttcagttttagaagagtatcaaatcaatgagtagttcaacacttcgataacgaaaagtacgttattacgtgttttagaagagtatcaaatcaatgagtagttcaaccacacaaagattctacgttcgcagctttaagttttagaagagtatcaaatcaatgagtagttcaacttagctttcttatacagttcattttcaatagttttagaagagtatcaaatcaatgagtagttcaacaaacaacaattggaggaaaaaacagcatgagttttagaagagtatcaaatcaatgagtagttcaacctgcgattttgtttaacgctcgtgattggggttttagaagagtatcaaatcaatgagtagttcaacaccgcgattttaaaggagtttggataccgggttttagaagagtatcaaatcaatgagtagttcaacctaaattaacctcattgtagcacgagataagttttagaagagtatcaaatcaatgagtagttcaactatcattttaggcttgtcggctattattttgttttagaagagtatcaaattgctcctatgtcaataaatggcacatctttttctaaacactcgttctaattctgtcggaattaaaccaactgatgtaatttgaggttcggattaccaagtcctcaaaattggaaaaagttgtttgaaaggcaaactctctcttcaacaatgagtgaaaagcttcaattggcccattatcataaggataaccttgttttgagtatgagtggctgatctgatgccgttcaagtaaagtttcaacttcgttgctggtgtactgtgaacccatgtcagagtgaaaatattgtggcttttgatgacattcaagcgcctgattaatcgtttctacaactaacgtcgcctccatctgacgaccaatcttgaaagcaagaacttgatgaacctttggttcgtaaatagaactgagataaacccaggttcctggacgtaattccaaataagtaatgtcagcacgccatatccttgcattgggctggtgcttgattaaattggggcgttgtgaatgatccacatgagtgccaggttttttaaatcgccgattcattaaagagtgaatctccatttccctcattaatcgtaaaattcgttttgacccaacacagatgcctgacttgcgaagcaccatcgttattcgtggataaccataggcacgataattattttcccaaatcaatttaattttttctttgagttgattatcaacacgttcgtgttgactaggttgatatcttttccaatggtaataggtgctgcgcggtaatttcagtgccgaaagaataattgataagcggtgtcgcaataactgatcttctatgaagacaaggcaattaattcgtcctaatgctttcccagtaacaccgccgcagcttttaaaatttcgagttcctcctttaatcgctgattttccttttgaagttgtttgaattctttggacgttacttcagtaccgtcttctagctcaactgatttagcgcctttaacccagttatgaattgcggctggagaaacaccgtattcctcggaaagcgagcgaatagatcttttctcttcacgatgcatcttcacaatgctggctttaaaatcatcttgatatcgtttcattggaatgctcctatcttgttttattaattatggcacaactgttcagaaatttatgtaccaaatactaggataggagcacaatgagtagttcaacctctaataaattagaatgaaccacactaacgttttagaagagtatcaaatcaatgagtagttcaaccaacgactagaaaaatagctacgtttaatagttttagaagagtatcaaatcaatgagtagttcaacttgaagtcgttgtcgctaaatgtttgctgagttttagaagagtatcaaatcaatgagtagttcaactgtagacgtattagaaacgtcccaaggtcagttttagaagagtatcaaatcaatgagtagttcaacataaatcacgttggctcattccacggttaagttttagaagagtatcaaatcaatgagtagttcaacagtcttttattagcaaatttgcgatgtggtgttttagaagagtatcaaatcaatgagtagttcaaccggtattgtggctgaccaaatggctcaacggttttagaagagtatcaaatcaatgagtaatattaacctatttcccgtgcgaatctattgaaaaagatcacgttgtccgcatggtcttttttcatgcattcaagcattgaaaacagttctcaattagcatagaattaagagcgtataataattgctagaatgcgattcttggagggtcatctatgtctaaattagagattatcgatttgcacgtcggcatcgacggtaaggaaattttaaaaggtgttaacctggaaatgaacacgggtgaaattcacgcgatcatgggacctaacgggactgggaagtcgacgctttcggaaacgattatgggcaatcccaagtatgaggtactacaaggtcagatcaaactagatggccaaaatattttagaaatgccggttgatgaacgcgcccgtgcggggttatttttggcgatgcaatatcctgctgaaattcaaggggtaacgaacgctgaattcatgcgtgcggcgattaatgcacgtcgggctgaagatgatcagatttcagtgatggctttcttgaaaaaattagatcaacggatggcattcttggatatgacggaagaaatgtcagaacgttacttaaacgaaggattttctgggggtgaaaagaaacggaatgaaattctgcaattgatgatgattgaacccaaattcgccatcctagacgaaattgattccggacttgatattgatgccttgcaagtcgtttcaaaaggcgtgaacgaaatgcgcggggctgattttggctcattaatcatcacacattatcaacggctcttaaactacatcgtgccagattatgtgcacatcatgatgggtggcaaaatcgtcacgactggtgatgcgtcacttgcaaaacgtttggaagacgaaggttatgtcgggattcgtgacgaattaggcttggatatcaaactgactgacgacgaaagtaaatagggggcgattctgatgaagaaaacattagccatcacgcctgaacaaatcgcgtcattctcacaattgcatcaagaaccggcctggtttgctgaaatgcgtcaagtagcgtttgcgcaaattgagcaactcgaactgcctatctttgaaaaaattaactataaacattggccagtgatggcagcaaatgcgccaacagccgttaaatccgatttgagtttaatgccatctgcggcagcgaatctttcagctgatcaaccgtacgcagtacagattggtcagacaactgccaagttaaatttaccggcagaattggcagaacaaggtgtcatttttaccgacattttcaccgcgttacaagaacatcctgatttggtacaacaatactacatgcaagtcacagtgaaaccgaacgaggatcgcttaacggcttttcacacagctttgatgaacagtgggctcttcttgtatgtgccgaaaaatgtggtgattaagcaacccattacggcttattatgtacaggacagcactcaacccgctgattttattcatcacgtcctcgtagtagccgaacaaaacagtgaatttagttatcttgaaaatctccaaacagcgggtgaccacaagaacttagcaaatgttgtcgtggaagtgattgctaaagataacagtcacgttcatttttcagcggttgatgcctttggaaaatccgtgacgacttacttgaatcgccggggccacttgatgcgcgatgcgcggattgattgggcattgggatcaatgaatgatggcaatatcatcggtgactttgattctgatttagtgggtgctggatcacatgctgaaacgaaagtggtcgccatctcaactggtaaacagattcaagggattgatacgcgtgtgacgaatattgggccgcgttcaattgggcacatcttgcaacatggcgtcattttagaagatgcgacgttaacgtttaacgggatcgggcatattttaaaaggggctaagggtgccgatgcccaacaagaaaatcgcgtcttgatgttatcgcggacagcacgcggggatgcgaacccactcttattaattgatgaaaatgacgtgcaagctggccatgctgccagtgtcgggcgcgttgatgaacaacaaatgtattatttaatgagtcgcggtctttcaaaagaagtcgcgcaacgacttgtaattcgtggtttcttaggcgctgttctaagtgaaattccggataaaaacgtgcgccaacaattaacggacacgattgaaaggaagttaatcgatggtcaaccagttaaatgattatcggtgcgactttccgattttagaccaaatcgtcaatgatgaaccacttgtttatttagacaatgcggcgaccacccaaaaaccacaagccgtgattgaccggttggtggcttattaccaaaatgacaatgcgaacgtgcatcgtggtgtgcatactttagctgaacgagcaaccgcccagtatgaagccgcgcgcacgaaggtccaaaccttcatccatgccgctgcgagtgccgaagtgattttcacaaaagggacgacgcaaagtttgaactgggttgcaggcagtttcggcccaaccgtggttgaagccggcgatgaaatcgtgattagtgtgatggaacatcatagtaatctcgtgccgtggcaacaactggcgcagaaaacgggcgcgaaattgcgttacatcgacttattaccggatgggcaactcgatttagagtcagcacgccaggtgattgggcctaagacgaaaattgttagtttggcgcatgcttccaacgtacttggggttgtcaatccgattaaaacaattgcggctttagtccatgcacaaggcggttacatggtggtcgatggggcacaagccgtgccgcacatgatggttgatgtgcaggcacttgatgcggacttttacgccttttcagggcataagatgcttggaccaaccggcattggtgtgctttatggcaagcaagcattacttgaacagatgccacccgtggaatacggcggcgagatgatcgactttgtgggcttacaatcttcaacgtttaaagaattaccgtggcgccttgaaggtggaacgccaaacattgcgggggcaattggcttaggggccgccattgattatttaacgcaaattgggatggatcatatccaagcccatgaacaagcgctagtcacaatggctttaccgcagctccaagcaatcgacggcctcacgatttatggcccacaagatgccgcccaacgcaccggtgtgattgcctttaatctcgacaatttacatccacatgatttagcgaccgccctcgatatggaaggcgttgccgtacgtgctggtcatcactgcgcacaaccgttgatgcaatggttgaacgttgccgcaaccgcgcgcgctagtttttacctctacaataccgaagcggacgtgaaaacgtttgtgaccgccattcaagcagcaaaggagtttttccaaaatggcactctctaaattagataacttatatcggcaggtcattcttgaccattcgcaacatccgcatcatcatggtcacttgacgactgccgatcatgaaattgaattacgcaaccccacctgtggcgatgtgttacaacttgaactggtgctcgaagacgggcagattagtcagattgctttttcaggggaaggctgtacgattagccaggcttctgccagcatgatgaccgatgccgtgatgcataagacaccggcgcaagcggaggcgatgatcgaacgcttttcggatatgatgattggtgatcgtgacgaagactggtcattgttagaagatgccgcgattttacaaggggtgcgacaattccctgcgcggattaaatgcgcgactttagcttggaaggcgctccacaaagccttaaatagcgatgaccgacgtgcaacaaccggtcaaatgatgaaccacgcagaaacggaggaaactaacgaatgacagaagagacaacgatgccccaatttgaagagtacgactacggctttagcgacgatgtagagcccgtcttttcaactgggcgcggtttaacggaagacgttgtgcgcgccatctcgcgtgagaaaaaggaaccacaatggatgttagatttccgcttaaaatcatttcacgcttatgaaaaaatgccaatgccagatttcggaccggacttatccgatcttgatttagaacacatgttgtattatcaaaaggcaacggacaagcaataccgcgattgggaagatgttcccgacaaaatcaaagaaacgtttgatcgcttaggtgtgcctgaagccgaacgtaagtatttagcaggttccagtgcgcaatatgaatcagaagtggtttatcacaacatgcgtgaagaattcgaaaaacttgggatcatttttaccgatatggataccggtttacgcgaataccctgaaattgtgaaggaatacttcagtacgttggtcaaaccaactgataataaattctcagcgcttaactcggccgtttggtcaggtggcacgttcatctacgttccaaaaggcgtgcggacggatattccaatccaatcgtacttccggattaacgccgaaaattcaggtcaattcgaacggacattgattattgtcgatgaaggcgccagcgtgaactacgttgaaggctgtactgcaccaagctattcaagtgatagcttgcacgcagcggtcgttgaagtctttgtgaaacgggatggctattgccgttacacgaccattcaaaactggtcaaagaacgtttatagcttggaaactaaacgggcccaagccatggaaaatgcgacaatggaatgggtcgacgggaatctcggttcgaagatgaccatgaaatacccaagtgtctacctcgatggtgaaggtgcccgcggaaccatgctctcaatcgccgtcgccggcgaaggcgttgatcaagacagtggcgcgcggatgattcacgctgcaccgaatacgtcatcctcaatcgtttcaaaatcgattgccaaagatggcggggccgttgattaccgcgggactgttcgttttgaacgcgacagtgacggttcgtttgcccatgtcgaatgcgatacgattattatggatgaccgctccagctctgatacgattccgtacaacacaattctaaacggcaacgtttcaatggaacacgaagccaaagtctctaaaatttcagaagaacaactctattacctgatgagccgtggcatctcggaagccaaagcaaccgaaatgatcatcatgggctttgtcgaaccattcaccaaggaactcccaatggaatacgcggtggaattaaatcgactgattagttatgaaatggaagggtctgtaggataaccctttaaatataagctgtaacccttgataatatagggttacagctttttgatttggacgatatttggtgatgttgtcccaattgttgtcccacgaggattagaatcgttcataaagtcagcgaataaattggaaactttttctttagatgattgagtaacatgcgcatagatattcatggttgtcttaatatccttgtgccccaagcggtccatgacttcttttagaattgaatcaccagggacattagcattgattgcagactcaaacattagggatgcatgtgtgtgtctgaagccgtgtggagtaattcgtttaaagtgggtggcatatcgctttgcatcgattctagcttgtttaatttcagcaagatcttcactattctctaaaatatcctttgctgcagcaagcttacggtcgtagaatttattgatgcgtctataaacatctttcatccattcgttagccatctgtgggtagcacattgaatcatcgacttgtcgaaaaataaaccgatcctgcgggctaccttcgttagattccagagtatctagttgatactccttcatgattcttagcgtttcgtcatcgagagagatagtccgacgtgagttcttggtctttggttcttgaatcaggaccttcccaaactcatcaattgctagagtcttatgaacatcaagtagcttcttatcaaagtcaatatcgcgccactgtagagcaagtgcttcagacttacgcattccagtgaaggctagaaggcgaaaataggtaaagactctattttttggacctcgtttattgggatatttttttgcccattcaagaaattcaagcacttgttcccggttgtagtagttatcgggattgagacgttctttttctttgggaatggacaccttcgccattggattacttttcattatttcttgattgacgccaaacttcataatttttgacgcttgttttctgatgtaattgaattgcagaaactcgtcataccattcattaacacagcgctggcaataagtgacagtgatcttatcaagaggtagattaccaaacttaggtaggatatgaagttctgtataacgacgagcgacagcaactgatgaaggtttaacttcgagccgatactgttttaaccatatatcgtatagttgcccaaaagtcttaatatttgtttctagcttagggccttcattgacgtacttcgcgaactcggaagtgtaagaagcacgggcttcgcgctctgttgaaaagccttgttttctaacttttgttcgtttgccagttaatggattgattcccatataggcattataagaataggcatattcgccgttcttctttttgtattttgtaattttcattgtaatatcactcctaaattaaactaatacttgctgttcggacaatttttgtttaaaattaggtacacaaagagcgcacgcactagcgtacctttttccataagcacatccaactgtttggcgacgggggatgtgctttttagttttttacatttaaaccttagtcattattaattttaaggttgtaaaattgttttgtaagttcatctcttttttctttaatagaatctatatctaaatcattatagtcgttcaaaaatgatttatattcatttttaatgttccatgcttcctcatatgcaagcttatatttgatacttttatttttagagtcgtaatttctgaaatataggctaattccgagcgaaattgttgaaatagttgcggttataatttttatagtagatttatttataaaaatcgtactaataatcccacctgatgttatagcagaaataataatttgtaaattttttaacaagttctgcccgtgaaaatagcgtttatataactttaagttatgtgcatagaatgcatcaacttcatcgcaagaggcattaatttaatattagtgattatttagattttgtaattccacgaattatttggtgacggagtgtactctttttattgtaatgtacttgttttgtactttagaaaagaaacaaatgctgaacaaatttcgactgcaaacactgcatcagcttcatctattttatagtcgcgtttcttgggatgtcgaatgccgccatcagaagcatacccataaagtttatttaatatttcaatatacacaggatggccatctagaaatttatacttttttaggatttttatattctcaccaaatctatctgttggtgtatcatcgtagagtttagagataacatttttaatagctatttcgacaccgtcaatagactcaccaataatattagagtaatctgctcctaccctagtatttggtacataaatttctgaacagttgtgccataattaataaaacaagataggagcattccaatgaaacgatatcaagataattttaaagccagcattgtgaagatgcatcgtgaagagaaaagatctattcgctcgctttccgaggaatacggtgtttctccagccgcaattcataactgggttaaaggcgctaaatcagttgagctagaagacggtactgaagtaacgtccaaagaattaaaacaacttcaaaaggaaaatcagcgattaaaggaggaacttgaaattttaaaagctgcggcggtgttactgggaaagcattaggacgaattaattgccttgtcttcatagaagatcagttattgcgacaccgcttatcaattattctttcggcactgaaattaccgcgcagcacctattaccattggaaaagatatcaacctagtcaacacgaacgtgttgataatcagctcaaagaaaaaattaaattgatttggaaaaataattatcgtgcctatggttatccacgaataacgatggtgcttcgcaagtcaggcatctgtgttgggtcaaaacgaattttacgattaatgagggaaatggagattcactctttaatgaatcggcgatttaaaaaacctggcactcatgtggatcattcacaacgccccaatttaatcaagcaccagcccaatgcaaggatatggcgtgctgacattacttatttggaattacgtccaggaacctgggtttatctcagttctatttacgaaccaaaggttcatcaagttcttgctttcaagattggtcgtcagatggaggcgacgttagttgtagaaacgattaatcaggcgcttgaatgtcatcaaaagccacaatattttcactctgacatgggttcacagtacaccagcaacgaagttgaaactttacttgaacggcatcagatcagccactcatactcaaaacaaggttatccttatgataatgggccaattgaagcttttcactcattgttgaagagagagtttgcctttcaaacaactttttccaattttgaggacttggtaatccgaacctcaaattacatcagttggtttaattccgacagaattagaacgagtgtttagaaaaagatgtgccatttattgacataggagcagtcctcgttgttatctagtgaaactatactatcagataacttttttgagacaggagcaggtttctcattagtgtcattgattgtctctttatttgaattatctaaaagagcttttttaacaattttctttctattacgaagaatcttatctatagatttattttctatttccttaatatctaatcgaagccatttgttaatttggctagcatcgtaaagcatccatggaagggttataataacgcccattccagctgatagtattgttattaaagccattaccgtagcagatttcttttggttaaaataatagcgatgaccaccaagtagacctaagacaagccaaatgatccatgccgcagtggcgctttttttataatttgaaacatccgaactaactaacaagagttcagacgttgttagttcattgatactttctgtagattcccccataaatacccctccagatatgttagactgtatttatgggtgttgctttttattttgtcgggtaacactatatatttgcgtcctacttcccccagaagtagggcgctttttttatgcactcaaaatttgaataccgttggtcaagttgatcagcatacctttgtaagtaaaaatattgccgcgcttaattcgataatgttcaattgctttgtttaaaaattttggcgtgacatccagaaggtcggcgagttcaaactcgttagtggcatactgttgtaatgcaatcaggtcgttcaaattgactaaccgttcataggcgagtccacgtgctttattttcctgtttaacatcttgcaagtttttttggtctagaatatcaccaacagtactttcctgatgggcaacttcctcagccaagttctgcagctgttcttggcgagattttcgactattgagcaaaattgtactgccctgacataaaccaccaagcttgctcggtaagtcgtcacgatattctatcttatatttaatactagtttcagcaagcaatgaatctaatttatccataaatacaccttatttcttgcgattcttaatatagtcgatgaaattcatgatctcttgaatgtcttcttcagttgcatcgtcatcgatatgcgcagctagaagggatgcatttgaatcattgtcatcttccttttgttcgcggccaagcaagtaatcaattgatacgtcaaaataatcagcaactttttgtattttgtctatcccaggtgtctgcgtctgccatctacgaatagtaccgttgccgaagccgagcttttcttcaagactacggattgaaaaaccgtgctcacgagcgagtaatttaatacgatcgtacatatccataattttctcctaattatgaacgtatactaataatcgcaaaaataacgtgttttaagttgactttgagattattagtatatatactgtgttcataagctaatgaatttagctaataagcgtacaaaaaatagactataagattgctccccagcatttatagatttgtcgcttatttgctatgccttgataatagcatattggtataaaagtgtaaatgtttagcttaaaattttagcaaataatctaaggagggcgatttcatggataaatcattggtaaagcaaatcagaattaaacttatcgaaagagattggaatctttcaaatttagcaaattcactaaacctatcgacagcatatgtatcagatatcttgaacggtaagaaagatggtccaaaagcacaagagcatattcaaacgatgattcagattctagatattaagcaagcagctcattaaatttattttccaaaatttagagttgctgcattaatcattaatgggaggtgaataggaatgaaaatagttagctacttaatagatataaaaaatgcgctacaaacaattgcaaattgtatgcagcgccaaaatccgaagtcatttgattttgatgaagacttggttgagttaattggtaaggaaaagcttaaaaaggtgatagcaaggttagatactacgtattacgaagagtgtggtgtattacccgacgattataaatttacgatgactaacagagaaggtggagcccatactcttacagttggtatatcaaaggaatatatcaatgagagatttaatggaacacacttcatagctgaggtccaaaattccaatcaggattaggggctaaggatttatcacgtgtgattaattcatcaatgtctacagaaaaattataagtcttaaatgttgtattaattgaaagtgaatttttaccacggatattgattgaggagagttctttttcgtataacggccagactaggtagccttgtagtgactcaaaaggaccgagtgtgacagttggtgaaattgttgaagatccaatattaaaacctatagataaatctgtaccgaaaaatgtaatcccgttttttactctatttccattacgggtgtgaacctcataatcgtttgttaactgggtatatgaatttatttcatggccgttcaaattaaacgatatcaatgaaatcggatttgaacttttattcttaatgataatttcaataataattcgatagcgacgatcactatagatatctggattatattttttatcgtactctggctcaatgacacatgaggaatgttttttatgcaactgctgaatttttaaatgaggtcgtgaggtccaataatttctaacagaaagaataaaggaaggtacagcgagggctgaagcgattaaagcaatattggtactagtaaatagcgattgaatagacaaagtagatcatctccttaaatggagtatatcaaacgtacattttatatcaatagtgacaggagggagtacaatgccaggaattttcagtgaggcattcttaggacaaatcattaatgaaattaagaaagcaattcttgattttaagaagataactgagaaatcggttgaggcctatcccggttacatgaatttaaaagccgcatctaaatatgccggctgtagtgataatacattcaaaaaatttgttgaatatggattaccgcaaattcaaatagaagacatgaatcctttatatgccaagaaagatattgatgatttcatgtttaaacataaatattaggaggtgattcaaatgaaaaagcatttttacttagccatcatgatcagcatcattgttggtttgtatattccaaaagatatgcagttcgcagtcacaattatgattatcagctcgattgccacttatgtaggcattaatcacagcagcttctttccgatgaaaggaggtgaagatgatgaatgagttacaacagtttgactttgaaggtcagtcagttcagatgattcaaagcaatggttggatttggttcaaagttaaagacattgcattgattcttggcctaaccaatccaacgatggccgtccgcaatttagatgaagatgaacgggctaagtttaacttaggtcgtcagggtgccacgaattttgtgagcgagcctggtctttataagttaatcggtgcgagccacaaaccagctgctaaaaagttcaaccgctgggtcactcatgaagtactacctagtattcggcagactggcagttacacagtgcaacaacagccccaattaccgcaatcatttgctgaagcattgcaactggcagctgatcaagctaagcaacttgaagcgcaaaagccgaaagtgttgttcgccgaatcagtcgccaccagcaatagcaccattttggtcggtgaccttgccaagattattagcggtaacggcgtatcaattggcgcgaatcgattattcagttggatgcgtcagaatcattatctgattaatcggcggggcagtgattggaacatgccgacccaacgttcgatgaatatgggccttttccaaattaaggaaacggtcatcaaccgatcagatggttcaccaacagtttccaaaacagcaagagtgaccggcaagggtcagcaatattttatcaaaaagttcctgggtgatctttatccagttggagaagaataatttgaacattaggagagtgccagtgatgacagacaatacgaaccaattaaaaaagccgcaggacatcgtgttctgggctaaggcggattatgcaaatatgatcgcgattaatatgcggaaagacatcgccaagaatttcggcatgccagctgaagtcgaagtcggtggattccctggtgacgagatgcgaccaattcgcgtgcattattttggaagtgacaccgagtttcattcaatgaccaaatacatcaacggtcactacagttttggagttgagcgcggtgaacaataacaatttagagcataaaaaaaggccttaacccatagagttaagacttcaatgtaattcacctgataactgaattataccgccaatggagcgttgaagtcaacatatggggacggcctttaccgtgcttgtatgctgtattatctttacgacgttttcagaagtgggtgtattcgaatgagatttgtacgtgagaaaaaaatattctgtgggccaagttatgtagaagtcgatatcatacccagaacttgggaagcagatatggttgcaaaacgaggaacacgatctaagaaaaaaagagagtcggcaccaaagcagcgcaacctgaacgagaaaaatgccaagcgatacctaagacagctaggaaatggaaatttcggtagcggagattggtttattagtctcagctatcaagaaaaattcaagccggaatcaatggaccaagcagaaaaggaagtcggtaattatatacgacgcttgaaggctaggtataagaaactagggcatgagtttaaatacattcttgtaaacgaaggtggcactaatacagttagattcaatcatcatttgattattaatagtttagagagcggattgaatagagatgatgttgaagcattgtggtctaagaaacccaaaggacagaaacgtgagcgtattgggatggtgaatgctcgttcgattcaaaccaatgaaaatggattagaaggcatcttaacctatttgagcaaagacccgaaaggtagaaagcgctggtcttcttcgcgcaatcttgtgagaccagtctcacgacctaatgaccataagtacggaccgcgaactatcgagaaaatcgcccagacacctgatcaggggcgagactatttcgagaaaaaatatcctgaatttgatatcagtgaaattgaagctaagtactacgaagaaaccgggtggcatgtttatttgaagatgtggcgccgtgttgggaggattaatagatgacagaagtaaaagtacccagagcttattgcatcggtcgggttaagaatcatgtgattcaggaatacagcatgttcttatacaacgacattattttggcacaagctgactgcgattcattgaatggtgccgataaaaaattagaccaggtcgagggatgttggactgtattggaatttggcagaccaatatttgtgaggtcgatgggatgaaacgtatcttaaattatcccggttccaaatggacgatggccagttttatttgctccattatgccagatgattatacgacctatgttgaaccatttttcgggtctggagcagttttctttaataaagaatcgagcacaattgaaaccatcaatgatcttgattcaaggttagttaatttcttcagagtatgtagggacgaaccagctgctttaatgcaaaaggttcaactaacaccgctaagtcgtgaagaatacgaattgagttatcagataagcgatgatccagtggaggatgctcgtcgaatgctagtgcgaagttggcaagcgattggtggtaagacttcagataaaactggttggcgggccaatatcaatgtgaatggatccaagataaacgaatggaaccatttagacgaacggatagcagctgtcgccaccagactgaagcaggcgcagattgaacaccagaacgcctttaaattattagaccgctacaacagacctaaggtactcgcttatgtggacccgccttacttattgagcacgcggaccaaacggcattataagcatgagtttactgacgctgatcatgaagctttactcgaccagctggttaattttgacggctatgtgattttatctggttatgaatctgatatgtataacgacttcttagcggattggagcaagattcatttcgaggttggcgtcgaatcaggtggccgagctactgaaacgatttggtgtaattatgcaatccagcaacctgtgagacaaatggaattgatttaaatattttaggaggtggcactgtgattcaacgttatcagtcaaccagtcgagttgtagctgaacagtttgatggttctaaacagatgatgaaaaaatataaaatcattaagcagaaaaaagggcctcatgattacacaatgcatgcatacagtgatattgggatggacattggcgattacgttctgattggtaatccaggggaatacggcagtatgtcgagatactattttgaacagcagtacgaaaaagaattgcgtgatccgataccacttagcagaaaaaaacacgcagatttatttgaacaaacatccctactttaggaggattcatcatgacaccactatggtttttaactgatgccggcaatcaatttattttattcgtgatggccgtcgtgatcaccgccatctttgtcggatttatgtatctgcacattaaagaacgctaaaaattctaaattggaggaacagcaattatgcaaccaattattattcaacttgaagagaaatattgtgaaattgtagattgtgtcagtgactacgggtataacggtgccgttgaacccagatgcggggatgatacgtgccaatcagaattggaccatctattaaccgattggcttgaaggggctaatgacctacgtgatatgcaagcccattttgaattgaaaaatgccgagtttgaacaaatgcttgcagcaatctttattgctgatgaagtgcaatatttttaaattttgggggaattaaaatgtcacgaattgaagaaattaaatgccgagatgattataaggaattacttgaatatagtcatcgcatggttgaggcatgggaagagtacacccaatataaagcatgtcttcaagggaaaattcatgggacttcgtatgattggcaaaagccaatgatattagctaagcaactagataagttatatgtcgaaagtagggatgtttaatgtctaaaggaaccatcgtctgtttaaccaaatatggcgttgctggtcgcatcatcgaagttcatcccgatggactcgttatgcaagacgaactagaccgccagtatttctgcctcgagtcagaattgactgctattactgaatcagaaaggatgagattatttggatgatcgtcagactgaaatcatcgccgagcacctgatgtctggtcagcggatatcagtgtacgacgtgcagcgtcatttcaaattaaataaggggcaagcaactgagctattgaaccttgcccaaaacaaagtggaggataacaagaatgctagacagactcaaaagcaagctgaagcaactgctaagcggcgcgccgaaagatacttcaaccgatcgggtgaacggcgctcccggtcatatcgataaagtaaaaattagtttgagtacaacagattttgaaaaagaaattactgaccttagaaggataataatggcaaatcagaatcatattgaatatagcttaaagcatcttggcatgaccacatacgagaagtggcacaaacgtaataagaaatggagatagcatgatgacagaacaattatttgattttgaattaagcaagattgcaggtggtggtgctcaagagcaattcaccgctgaattaaaaaagattgcggataacattctggacttgaacaccgaagctaaaacaaagcgcaagttgacgatggatttggtcttcatccctaatgacaagcgcgatgctgtgcaagttgaagtcgcggttaaatccaaattggcaccgcaagttagtgttgctaccacgatgcttttgggccgtgacatggacaccggcatgaccgcactcgctgaattgaagtcgggtgtgccagggcaaacctattttgatccagacgattcagttcaaaagacagataccggtaagccgattgatgaagttgaagctgaatctgattcaaaagaatcaaaaggtaacgtgatcgatttacagaatcagggttagggggaatccataatggaatttgattataacggaacacactatgacacatataaaaataatggattacagaatacaacagacaatgaactaaaactaaaagtagttcaggaatggttctggtttgatgatcctattcgaatattaaatgaaagcagtctagatattgcatttgaattagcactgatgtctgcgaagtatgaagacattatttatgaattaacaggcggaacactttcaaaagcgggtacttatccggaatgggtagttaaagaagcagagcaacattttgaacaattacattcggaggatgattaacatggaaatgacaacagacacaatcaacagattacacgaattaagtttagaagcaggtaaaggtaaggtcatcgaggttgatggccggcattatgcgattgaccgtcacggggatgtctgcttaatcaagccacagaatttagctgataacacagtcgaggttacaacactgatgggtgtcgttgatctcgtcaaaagtttggaagagcgcaagacgcaaaatctttatgtccaagttaagtcaccaacaaaggtggcagttttcggtcatttagacgaatacggtcgtcgtgagtcattggtcatcgctaaagcaatgacgccagatattaattacagccgctttttagatcaggaacaaatgaatatctcacttcaatctcaatttgaagaaaccaaagaccgtgagttgttgctgaaggtgattggtaatctcaaagaagaagcggtccgcaatgcgagtgatgatggtgtgagccaagccgtcaccatcaaatcgggtgtcgcaacggtgagtgatgttaaggtgccgaacccagttggcttagcaccataccggacgttcaacgaagtcactcaaccaaccagcaacttcgtgttccgcatgcgtgaagggatgcaaagcgccatctttgaagctgatggcggtgcatgggaattagaagccatgagtaacgtcaaagagtttttaacaagaaatttggaagatgaaatcgaaacgggtcatgtgatcgtgattgcctaaggggatgaagtagttgtcaattgaattaacgagtgaagtaattgaagatatcgcaagtgccgtagcaaagaaacaacgcaagttaacgcgtaagcagcagaagtttgaaaccaatcgacgactacggaataccagaatgttgctcgaacattatcgaccattgactgatcacattcttttaagcgaaaagtctgaggtcgagacaatggaatatgaggttgagcatggcacggtcatccggttagagtcagtcggtaagtatcacgagaagtctcgccagttactgaagtacatcaatatggcactggcaatgtacaaggaacgatgtgtgaactgggacgaccttgcttataggcgctatcggacgattgaatggctatacttatccacaacccacttaagtgagagcgagattgctaagtattacaatgttgaccgttcagtcatcaaccgtgataaagaccgtgctatcaacgaattatcggtgttgctattcggaattgatgcaattttagacggatttacaagccgttagagcttgcacaaatcttgcacacaaaggtcacaaatccagtgttatagtagtattatagaaatattcagttgagggaatatttctgatgaaaaagttagtcaacatcgcgtgaagtcctgccagaaatggcgggactttttttggaaatatgctacaatttttaacgaggtgatattttatgaatgaagataatattgcggaattaattgaaattgttggtgcagatgttgaaacagaaattggcaatgatgatttcgtattcggaaactatattgaatggcctaagttagagaatttggactcacaaacatttgcggcacttgtaaattatttcgaaattatagaagactatgatgatgataatagagacgaaattattagagaaatggaagacatgggtatgccaaatggcgatactgtttatgaaaatggtggggaaatggatgaatatcctgaatcttacaaatattttcaggcagatgaatttatcccattagattgggttaagtacatggaacgcatgaatgctttaaaaattagttttaagagttcaaacagtagtcttataaaaaaagcactattacttgcaatgatggcattaaccgagagttatgcaaatgatgttacaaatgaaaatgttaagagtgcagttgatggtactactaatgacgttctcaaaacgtttattactaaaaaaattgaagatgacatgaaaagagaggggggacgtaaagagataattaaaacgtttgtatctgatgaaattaaagccatacctgagaaaataataagaaataagctggctcatgatattggaagcaagcaattgatgatagatggagatgtgattactctcataaataaaggagagcctgaaaatacaaatattgataaagtttggattgaattagtggactatgctgatttattctaccagtcaaaaaaatagatagtatactttttaaaacaatctagaattgttttaataggcggatgttggcttatttttatattaatttgaggtgacggatcatggcatatggtgatattagagacgcatttgttgcggcgaaaaattttgcgactggagcaaatgacttacaacttaaaagtgtattattagatttacaagatatggtatttgaattacaagatgaaaatagaatgctaagggaagaaaatcattcacttaagaatgagaaaatacttgaatccgaactatacaaggaaggtatggtttggcgtcgagtgggaaatgaatatagatactgccctaagtgttatggtaaagataataagttaatagtttgtgacgagtacaataatagtgactttggacacggttaccaatgtccagtttgttattcaagttttcaaatatagaataggccagcttaatcgctggcttatttttgtgtcatcaattacgaggagtgatatctatgaatcatagaatcaaacgtggttttaacttttataaggaaccaattattgtatacggatcggacaggataatcagtattagccatggtaaatatttgtcgtggggcgaatcgaatctgattagacttcattcaagtagatattaaaaggaggaaccatccatgcaaaagccaatcatcaatgcaaccgtgagtcggacatctgttgatgcaaatccaatgtttaagatagtcgtgcctaacaatgtcgaaacgaccgaattagaatatgtgttgaccagagtcatgtacaacatggtgcgtatctacgcgagagggaaacacatcccgtttgaagatgcgttggtacaatataaagaagcgatggctgttcatatcggtgtgatccatgaccaggaacagaagttaaaggaggcgcaagatggcagatagagtcgtgatgatgtcgcaagatgaatatgatgagattattaatggtgtgagtggtctaccattcgaagtgaaccggacagtgggtagcaatggtcagttcgttcggactgtaatcgaggtctctaagtctaagatggaacaagcgctacaagccaatgactttgaagcggtatcgccaggtgatggttcgcctatcaactatgcctgcaatgtaaagtggattgactgataagtatatccgcttctatcataccaaggcatggcagtcagcacgcaagctggcactagttcgtgaccattacctgtgccaagagtgtttgcgtgaaggtatcgtgacctatgcacgcattgtccatcacatcattccattaaaagataattggtcaaaacgttgtgatttaaagaatttagaaactatctgtcctgaacaccataatcaagatcacccagaaaaagcaacagcaaataagcaagaagctaaacatctgcacgcacagaaaaagcggacagatgtttttgtattccatgcgaaccgagaattgaagtagccccccctaggtccgataattttttggtgaagttctaaaacaacggtgattacctccctgtacaataaattcgtttttcaataatttttttaacgcccaatctggggctttcagaaaaagaaaggagggatgttagatgccgagaactgctaaaagtgccatgttgcatattatggagggaaatcccaataataaaacaaagaaagagcttcaaaaacgccaaaaaaatgaattgaaaatgaaattatcggcggataatctggtccctccgaaatggttgagtgctggtgcaggcaaaagattttctgaaatcgttaaaattatggcgccaaccggtattttgagtgacagtgatgttgacacattagccatttattgcgataccttagtggactatcagtcttataaaaataaggttaaaaagttggggatgtttaaagatggcaaggttaatccgtttgtacgtgagaaacgtaacaccgctattctattgaatcgctatgctaatgaacttggactgacaccatctgctcgtgcttcgatggccattcatatgggtgacgatgaagatggtgatgaagatgacttctaagattcttgactatagtcaaacccaactagaacgatggtgggtggcttacaaagctgaaaaattaggttgggcttatctgcaggaaccatcaccgcaattattaacgactttttatgctgagatggttgctgaaggctcgattgaagccagtgaggagaatattcaagctgcacatcgccacctaaaagatctaaagcgccaaggaacagatgatttcccatgggtatttgatgaggagcgtgcttggcgaccaattcgatttattgaaaagaaatgtaagccatcaaaaggtgattttaagcagctggttctgcaaccgtggcaacattttattattgggtcgatgtgtggttgggttcatcgtgattcagggatccgcagattccgtgaaggtgtgatttttgttgggcgtaaaaatgggaagaccacgcttgaatcagggttggctgattatatggctggctttgatgatgaacgtggtgcgaacgtctatttcttggctaactcacaggcccaagcgcggaaactctatgatgaatcaaaagcaatgattgaagtatcaccgtacttatcaaaacgatttgtcacgacgcgttcagagattcgctttcctaaaaatcattgtacgatcgtgccaatgtccgctgaaaagaataacaaagatggtgaaaatctccattttgccgtgtttgatgaaattcacgagtacaaagattatcaactaatctcagtcatgaaacggtcacgaggtgcacgtcggcaaccgttgattatctatatctcaactgcaggcacagttttagatggcccattaatggattttgtcgataatggtaaggaatgtctatccgattatgatgcgcatttagatgaacgtacgttttattatttagcgaagttggacagtattgaagaagccgacgatcctgaattatgggtcaaagccaatccaaatatctgtatgatgtcgatggtcgatatgatcaccgattataaaaaagacaagaaaacaccagctgaattcgctgattggattacgaaacaattcaacatctttagttcaactgatgaattaagttttgttacattagataccattaataagaataatgatgaagttgatcttgaatcgttagaggggatggagtgtatcggaggctatgacttatccgaaacggaagatttcaccgccgctggtcttgaatttaaattggaagatggccgcgttttctggctcatgaagtcgtgggtaccacaagccagatttgatattgacaagaatccggagcgactgcgcgaatgggaacaagccggttatttggagattatcccgggggattatgtgaattatgagtacgtgtataactggttcgttgagcaagctaagcattacaaaatatcgcagattaattatgataaggctaaggcattgttcttgaaccaagcactaattgactatggatttaagaccgaaattacccggcaaggattcacaacgttgggtggaccaatgcaaaacgttaaggagttgctattggacggtcgtgtggtcacaaataataataaaatgttccgttggtatctcaacaacgttaagttggtcactgatcgactgaataactggatgccaaccaagcaaggtcgtaaccgtaaaattgatgggttcgcggcctttttgaatgcgcatgtgacaatggtcgagcgattgcaggccaaaccgaaaactggccggattaagtatgtatcgttcaatgatatctaattgaaaggaggtgatatattgcaaatgatgcagcgacttagacaattttttagtaaaaatcggtcaaccagcagtaataaaagtggcggactcagttcgtggattggtaaacatttctttgggattaacaatgaagcgatggacacgaatgagacaatttttagtgttatcacacagttagcaaacaccctgtcgtcattgccattgaagttatttgataattatgaagagcggaaggatatgacagttgctgatttgattaaatatcaacccaatccggtcatgacaacttttgagttcataaataaattagaagttgataggaacaaggacggaaatggctatgcgctaattgaacgcgatatgtatttacaaccgattgccttatggccaattccaccagagtatgtttcagtgcttcaaaatactgatgacaattcaatttggtatcaaatcacaggtgtcaatcagaatatgttggtcgatagccaacagatgattcacgttaaacacatcactggggcttcacgcctaacgggtatttcaccaattaacgttctcaaaaatgcattggcgtttgataaggcagttgcaactttctcactgaatgaaatgagtaagacagatagtttcaaagtaacgtatgaagccaatcttgatgatgagaaacgggagaataccattgaggatttcaaacggtttaaaaatgataacggtggggtcttatttcaagaaccgggcgttactgtggacgaaattaagcgtgaattcgtctctggcgatgtgatcaataccgaaaaaatcacacatacgcgaatcgcgaatgcattcaacattccgatttcattcatcaacaatatcaataacacggtcgctaccaacaatgaacagattatgacgcaatttgttcagaagactttaacgccgattgttcgccagtacgagcaagagttaactattaaattgctgacgcaggcacaacggaaacaagggctttatttgaagttcaacatgaacggtttgatgcgtggtgatgttcaagcgcgtacggcattctatcaagctatgcgccgtggcggtgtcttttcaaccaatacaattctgggattggaagatatgccactgtcaaaagagccaatggccgagaaattatttgtgtctggtgacctgtatccaatcgatatggatccgacacaacgaaagggggtgagttcaaatgccaaagaagatcaacaagccgttttggtcaatgacccagacaagtcagacggaagctaatatcaatattgatggtgaaatctcaacttataagtgggatgaatctgatacaaccggtgcttctttcagggatgatttaaaggcccttggggatgtcgatgtgattaatttacacattaattcgccgggcggttcagtgtttgaggggatttcaatcttcaatcaactaaaacagaataaggcaaccattaacgtgtatgtcgatggattagctgcttcaatcgcaagtgtgatcgcaatggccggtgacactatttttgtacccgaaaatgccatgctgatgattcataatccatggactgttggtgttggaaatgcttcagaactgcgcaagcaagcagatgacttagatcgaattgctgaatcaagcgttacaacctatttagcgaaatccaacggcaagattaccgaagaaaagcttcgtcaactgttagatgaagaaacatggttatccgccagcgaagcagttgaatatgggttagctgatgaagtgctcccagctaatcaaatggccgcttcaatcagtgatgagttcaagcaacgttatcaaaacgttccatctgcattattaaagcaagcagaaccagcaacaccagatacgagtgacatgcgtcaaaaaatgattaaccgagcaacaaaaacaaaccaattaattaaacaaaccttaggaggattttaaaaatgccagtcacattatttcagaagaaacaaaacctagctaacattggtgctgaattagcacaagttaacgatgatatcgcacaaaaagcagggaaccctgcgattgaagattcagtcttaaatgaattaagtcaaaaagcggatggacttgaaaatcgttttaacatgttaaaacgtcaaatcgatcgtgaagaacaagattcagctaaaaaagcgaagaaagcagaaccatcagatgatcctaaacagaaggtaacagatgcatatgctagtttaattagaacaaccatggcaaatcaagcagtcggcgctgacgtacttcaagcattaggtgacgacaaaacaacaactggtggtcaaaatattttgccagtgactgtctcaaataatttaattagcgaaccaatggaagataatccattacgtcaagacgaaattgtcagtgggattacaaacttaatcttgccaagaattgcttattcaattgatgatgacgacttcgttgctgatcaagaagttgctaaggaattgaagcttaaaggtgatactgtaacgttcaatcgttttaaatctaaattaaaagtagcgatttctgaaactattttaaacggtactaatactgcattagtccaatatgtcaacgatgcattggcttcagctgctgcagctaaagaaaagaaagttcaatttgcaacagcacctaaagctggtgaagaacacatgagtttttattctaaggaagttggtatcaaaaagattaccgaatcaactatgtttgatgcgattactcaagctgcaggtgatatcaacgatgcattccaaacaaatgtgaaggtttatatgcgtcgccccgattatttacgcatgattaaagaactttcgaacggcgctgctacactctttggcaaggcacctgaagaaattattggctatccagttcgttttacagaacgatcagtaacaccggttgttggtaattttaaatatgcacaattgaactacgaaattgcatcaacgttatatgaacaatggaaagactacgataacggcgttaattactttagcttaaccgcttggtttgatcaccaaattctattagcttcagcattccgtttagcagtcgttggcgattccccaaaacggtaactggcgttgatttagaccaaaagaccttagacttgaaagttggcgaaacagctactctgaaggctacggttcaaccaagtgatgcaacgaatcaaaccgttgcattctcaacgtcagatgcaaaattagcaaccgtcacaccggttcaaggtaaagtcaccgccgtcgctgttggtgaagcggatatcacggtcacaactgaagatggtggcaaaacagcagtgtgccatgtcacgattacggaagcagctgggagctgattaaatggaactaactgatttaaaaaataaattagcaattgatagtgatgtctttaatagtatgtggcagttgtcgctagatgcagctgaagcgatgattcagggcgcggtcggcgcgcaaaagccagagttctatgaagaaaacaagctgtatgagatggcagttgtcatgttaaccgatcacttttttaagaatcgttcagcaacaacgactggcaacatcaaggaaacaccactcggcgtgcagtcaattattctacaactgaaacccgcataccggttattcaaagggggaggtgattccgatgccgatagctgaaaccggccagttagaccaaacaatttcgattgttatcccaggtaagtctaaattcgatgagtttggtgatttagtgagtcgtgaagataaagtcatctatgaacggctattcgcgatgcaacgaaccaaaaaatcagacgatgttggacaaaacttaccggaattaaggacgcaagctcagttcgtgattcgccatcgtcaatcacaagaaacgctgattacaactaacatgttattgcagcattggaagttgattgacggaagtaaagtgaatgttatcgagtaccagattgatgattttaatcaggatacgcagtacggcgattgggatgttattatctgccaccgtgtgccggaggtgtgacgattagttttaaaatcgaagataatattgttgatggcttgagggaattaggtaccaaagccaagcgtgttcaaaataaagcaacccgagcgggcagccaggtttttgctgaagcattgaaacacaacacgccctacgaagatcggtcagaccgttcatggaagggtcaacgcgagatggacagaatcaagggaactaaatcagttttcaaacatatgcgggatgacattcaactatctggtattgatcaattcgggcacattaatgccggttttgggaaagacacttattggcgcgttcattttgttgagttggggacaccgaattatgcaccgaatccgtttatctctaagaccgtttctgaaacgcaaagtgtctatcaaacgactgtcgcaacggttttaaaaaaggagttgggactatgagaattggtgcgattcaagttggtaatattctcaaaggaattgacgcttttgaagaccgaatttacacgttaaagaaaattcctgagactgttttgcaagaaaaccagacaccatttgcgcaaattcatggactgccggttggggagaattactattcaagtaataagaagtttggtgaggttgcatctgcacaaattgcagtgtatgtgcaaacgaatcgtgaagctgaacaatttttaacgcaaatagaaacattactgagcacccatgaatttgagtgttctttttttgaaattaatccaaattatgaatatgacctggtcgtcttgacgatgcgggtcaataaatatcaaaaattaaagtgagggaaaaataatgccagaaacaaaaaaacgtaaagcaattggcactgccggattccggcgagtgtttattggaattatggatcaagatgaaaaagtatttaatgttgttaaagtcgacgaaacgtccggtggagcgattgattttaaggctactggttttactggccaatcaaatgttgtttacgcatcaaatatcgcctattggatttctgatgccggcacaggtactgggaaaatcgaattatcaactgtcgaattaccagatgatgtttcaactgctgttttaggtgatgaagttgatgaaaatggcatctacgtcactaaagcagatgttaagcaaccatatgttgcgatcattgctgaagcccaagatttggaaggtaatccaatgtggattggggttgggaaagctaagttcggcacaaccgacggcgatgaattgaagactgctgaagacaaagggatgacgcctaacaacgtatctctttcagcacaagcaatcacccgtaagtctgacaagattgtcaaagcaaaagcgacggcaagcaatggcacaaccttagaacaattcgctaccaagatgttccctagttggactggtgatttagaagaccttgacggtgaatccccaaaagagtaactggcgttgatttagaccaaacaactttaaccttaaaagtcggtgaaactgccactctaaaggcaacagttcaaccaagtgatgcagcgaatcaaaccgttgcattttcaacgtcagattcaaccttagcaggtgtgacatcggtccaaggaaaagtcaccgccgtcgctgcaggtgaagcggatatcacggtcacaacagaagatggtggcaaaacagcagtgtgccacgtcacgattacagcagcttaattaaaaattgaaggagcgtaactatgattaaaattgatttatatgatgcaaaaaaagatgaaacagctcattacgaaaagacacacatcgaatttggaatgttcaaaaagattgcgaaattcaataaagaaatgagccgtaaagaggctgaagcggacctaatcaagcaaaagtttgatcagggtatcttaaccactgaagaggaatctaagtatttagatatgatggccggcaatgaagttgaagatattgaagcaatggaaaaattgattgttgaattatttaatcatccaaaggtcaccactaaatcaattgaatccggtctggatttaagtaaaggtattaaagtcttacaagggattattaatgatgccatgggtggaattaaagcagatgcggatcatccagcaaaaaaataacgccggatgaagcacttgaaatccttgatgatattacggatcaattattggaaaatggcaccccgttcaacgacattgagtcaatggatgcgggtgctttttttgattacttagaccgaatgtcatccgatcaaccgacttcagatgagaacacacaatatctgtctgcggttgatttttacaaccaattttagagaaaggaggataaaatatggcagctgcaggacgtcctcttggctcaatggttgttagtttagggatggatgggagtaaatttgaaactgggttgaagaatattcaaaatcagttcaagttagctaaatccgaaatgaaagccaacctatctgtattaagtagcaccgaatccgcttatgataaagcggccggtcgagttgatggcttaaccaaagtgatgagcgtcaataatcggcagattgagacgctcactaagtcttacaaggaacaggttcgaattaacggtgagtattccgataccgctcaaaagactggcgctaaaattaataatttggtgcgggaacaggcgaattataagcgccagttagatgatgctaaaatcgcgatgcgtgaagctgaacgcggaactcaaagttatcaaaatgctttgagtcggcaaacgcgtgaaatgaaagctagcttatcggttttatcgatgcagggtaaagagactgaagctaatcgaactaaatatcaatcacttggccgtcaattagatagctacaataaaataattggtgctgagaaatcaaagttagaagatttaattagtatcaaaggcaaagacgcgcaacaaacgttggaacagaaaacgaagattgttgagttaacaagtgaacagaaaaaagcccagtatcagtatgatgaacttggaaaatcagtcaaaaatatgtctgaacggaatgctcgagcggtcgattcgcttgggcatttttcgaccaaaaccaaagaagttggtgatcatgtcagttcagctggtcattcgctgaccggttttagtacgttagctgttggtgcctttacaattgggaccgtacaagcaacgaagttccaacacacgatgcaagtcgtcaagaacaacattgaaacaggtggcgaatcggctaaggcggccattaaaggcgcgtcgattatgactaaagatgccgagaagttctcaacaaagtatgggatttcagttcaaaagatttctgaaggttatttagaccttgttaagcgtggctatgattcgaatcaagcaattgggtcgatgaacactttgctccaaggttcgattgcttcaggcgatgattttaatgacgttattaaggtgacgacgtccacgctcgagtcgtttaatatgcgatcagattccacagccgggatgatgaagaataccactgaagtgaccaacaaattagcattcgttgccgataaaacatcaactgggtttcaagatttaggcgttgggatgtcgtacgttggtggttccgcgtattcagctggtttgtccttatctgaaacagcttcatcaatgggtctgctctccaataatgggcttgaagctgataaagccggtacaggtttacgtaaagttatcaatagtttagtcagcccaaccaaagctgggcaagctgcattgaagcaatacggtatctctattaaagatgctaatggtcaaatgttgccgttgtccgatatcatggggcaattccagaagaaattagaaggtctaagtaagactgaaaaacttgatttattccatggtatgtttgggacaaccgggcaacaagcggctttaattcttgaagaaaacggcacgaagattggtgaattagcagatgaaactgatcgggccgctaagagtaattatgcggctacgttgtcggccaagaatatgcagaccgcgcagaaccaaatgaacaagttcaaagaaacagccaatattctggcgatccaattttcgaccacgttattacctgcgatgactgcagtcgctggtggtgtctcgaagctaatgggcaaattgactgagatgcctgaaggggcacgtaaaattacagcctttgcaattttaggcgcggcagcacttggaccgttattaattggaattggcgctttaattagatctatcggttccatcacgggtgcagttagaggtctaatgaatttcttaggcggtggcagttggttagccactacgctgactggaccaatcggaatagcagttttagcggtcgccggattagcaacctgcttcgttattgcgtataagaagttcaaaccattccatgatctagtagattccggcgttgcgaagttcaaagcaatttcaaaagcgattactgatttatttacaaatagttttagctctgaaaaagctggcaaagcaacgagtgtattagctaaattattgccgatgggaacccttggcccgacaatagccggcattaataaaattaaaaccgcctttagtagtctcaaaacactgggcacgaatatgggtaaggttctaatcccattggctaaaaatgttgggaatgcttttaaaggcatgttcaatgtgttcactggtaataaatctggtgctaaagcattacaaaatatcttccctaagccaatcgcggcttctattattttcttaacgaagcaagtaagggcaagttttgattcaatgggtaagtcaatcaagagcatggctagttcagtttcaaaaacggttgggccaatctttaaaggcattggcaaaatcttcatgcaagtcattaatcaaatgaatgaattctggcataagaacggaaatgctattaaagaatcattcacgaatatttttggcggtattctagtgattgtcacagtgaagattaaagaagtattgtcagtcatttcagttgttctgaagttgatttcgggcgtcgttaagatggcacttaatattgttaagaacgtctttagtcaaacctttggtagcattcaagagattgttcgcggtgttttgaatattatccaaggactatggactattttcgccggtgtcttcaccggtaattggtcacaagtttgggatggtgttaagcaaatctttaaagggatttggcagtcgttcaaaggaatcgttggtggcgtattgaacgtcatcagtggacttgttaactctgggattgatggtattaactggttaacatcgaaattcggtgctaaagcaattggtcatattccaacagttaaatgggcaaccggtacaaccaagatgtatccaaatggcgttccaaccaatcagattgcaaccgttaatgacggtggcaagaaagaaatggtgatctatccaaatggacaggcggttattcctgacggttggaacacacaaatgttcttgcctaaaggctcacatgtcattaatggtgatgatactgagcggttgacgactggacaccactataagaacggtaccctaggtgatattggcgcagcactttcaggtgtcttcggaaaaattaaagatagtctttcctttgttggacagattatttcgaacccaattcagtatatgaaacaggcatttgaatctaagttagatttaggtggcaaaacaagttttgtcatcgataacgttaaaggtgtcggcggtttcgtcattgatgccgtaaaagacaagattgttgaatcgctgaaggcttggaaatccgaaaacgacaccgcagaaccaagtgggtccggtgtcgcacgttggcgtgattcggtcaagaaagcactggggatgttaaatctatcaacgagtgaatcgatgattgctaaggtcttacgccagattcaaaccgaatcgggtggcaatccgaaagcggctggtggcgatgatggcttagcagatggtaaagcaatgggcttgatgcaagttaagcctggaacatttaatgcttacaagttgaggggtcataataacattatgaatggcttcgataatctgctggccggattgaactacgcgatgcatcgttatggtaaagatttgtcgtttttaggcaaaggtcacggttacgaaaatggtggctttatctatcaagaacaaattgcgcggattggcgaaggtaacaaagcagaagctgttattccattaaccaatcgcaccagagcaatgcagattctggccaagattaaggatcaatatggattagatggcggcagtcaactggtactaaaagaccaacgtcaaacagtcaataatgattcaaaaatcctgaatgagattgttcgcaaccaacaaattatgattgagatgttcagatcattgcttcaaatgattaatacaatcatcgtgttgattcaggctaacccagaacaagcaagttccaatgggctagtgagtcagttaggtgacttgctggaccaagcaaagcaaactaagaaacgattaaaaaaacatcaactaggataggagtgttcagatgattcctgaattatttgtgacaaaggaggggcagacgattaatgtcgatgagttcaaaggcttgaacttcaccggattaacgacacaagcccctcaaagtattaccaactaccagtcaaataagattagagatgggtccgttcaaaacgggcctattttatttggtacaagaacggtcaccgccgatttctattttgacggtgaagatgtttatgattacaaactggcctgccaagatatttggcggttactgttctctcgtgaattaatcacattgagagaatcgatgatgcctggtcttaaaatggaagtaatcgctaagccatttgacatcaccagattgaactggcatgagatgacgttttctgttgaattcgatattccgtcaggttatcggcaatcgttagttaaatctgatgagctgcaattcatctatggtgaggaactatctcaaatcggaatgaacttgccaaatggtgaggacttgcattaccgattcaaacagacgcgcttcaaagtttataatccatcagacgtagttgtggatccatactggcagaaacatgagttggacatcattattaaggggcaaggaacaccaacgattaccaatttgacgaatggttatggtgttgtactgaaccgtgcgctcacggcgaacgacatgctcgtttggaatggtgtccgcccgctacttaacggggcaacgtgtgagcgtgataccaatcacggccacattcaacttgaaaagggatggaacgatattagtgtgactggcttgtctaatatcgacatcacttttagtttcccattcctgtatctatgattgatttcaagaaacagaaaatactggttcgcgattcgctgaggcaatacgaggaaacagtcacctctgttgtattcgaagaactagcacgcaagtggaaaaagaattcagataatcagattgaattcacggcgctgaatgatggctcattggcctacaatcttttacgtaatgaaaattcaatcattattgatggtcaagagtatgtcatcaagcaagcggagcgggcgttggatggctacgatcggtcagttaccgtcactgcgacacacgtctattttgaatcgtctcggatttataattaccaaactaaatccggcaccatcacctactcaatccaagatatcctccactactttttcgacggcaacccgtacggcttcacatgggaggtcatcggcaattttagcaaggtgcagattgaaaacttgggcaacactagcgcactggacgcgctcaacacgtgcgtcgacaagttcaattgcgtgatctatcccgacaacaagcacatccggatttacgcccgtgacgcttggcagaagcaggtcgacaagtcttatctatacggctacaacacgacgaccttcagctgcagttgggacacgacctcgattcagaatgtcgccatgtgttatggaaaacagaaggacggagaggagaatcagtattacttcgcgccgtttctggccaaaaacacaacgagcattcagcggtggggtgagcgaccaggtgccgaaatttcggatgaaaggtttacggataagaacgcgatgaacacatacgcattgggtacgatgcaagccgacccagtcaccacgatgtcactcacttatgacggcgatgaccaagtgttgcccggcgaggtttggtatttgcgtgttgaacctgaacagttcgacaccgatgtcgaagtcaccggcattaccgattatccattcgcacctgatcataaaccggaagtcgaattggataattccgttcgcacacttctggatgaggatgtggcacaggagcgcgccatcaagacggctattaaggataaccaagcggccgccaagcagattcagcagaccagtcaaaaggccgcgcaagcatacgactcgcgcttcatcggtgacttgtatggcgctgaacccaagctaaaagcacggacaatagcgccgacattgccggggtacattttaaaggtgccagcagacaatctggacttgggattgaaaaagggccagcaattctacgcagcaactgcagttgattacgtggccggactagctgagttcgtcgatgacaagataccagaagcgccaagctacgacctagttacaccaaccaaagacgggctgatgagcaaggccgacaaagcaaaattagacaaactaaaaacagaaccgctgaccagtctgcagatgaaagacgcggttaacggctctgtttatttgctcactgttgagaatggtgagattaaaattaaaaaaggagggttctaattggcaatcgtagaaaatgaaggacaaccattacaagatagagcctatagacaacatctcaatcgtaattgggataacatcaacggttttgaaaagacagttaataagcagtttaaacaagtgttgagtgacccaccagcatcgactgcggatgaagttactcagttacggattgacactaatgggaatgagtatccattggctaagccgcggattgactcgattgagcgagatgcgagttatgcggcaggtgaggttgttaaaaaggcagataaggattacgtcagcacctatctatcccaaattagtcatgtccccgagactgtaactaatctagctgaattgaatactaaatatccgaacggaaagccgggccttttcattgccgccgataatgggcacaaatatatttggacatctggcgcatggaaagactcaggagtataccaagcgaccgggcttgcggatgggtcagtaaaagctaagcatcttagttccgcggcaatgatgggggtgaaaatcgttacaggtgccggactgccgacttataatacgacgacaagaatctggaattggggcggaagtgataagcggcaggcgataatctacgttggcgataatagttacacactaattgaaccgcagctgtccattgtcaacgaggggacaaatgcggcttctaaattaatttgggacggttcaacattcagctttatcgaatggcaacttaaaacaccggttggcagctacgttgttgccttgattacaaattttggagatgttgctgtgacagcagatttcccagtgattataaatggtagcctcaatgtcgccgattccggcaacagcgggattattacgcctaatgtggtccagatgtatccatgtgcgggaaatccgccgcgttatgacagtaaaaagcagatttttgattttaacagcagaagcactaatcctgccacgatccagacgaacaaagagttccatttgattcccgttggaacagtggcgcacccaacgcaggcagcaaccacaaattatcgaaaaaaagttgtttacgatttgaataatgacactgcgaaaataatgggatactgggagaaaatcccaccctataacgttattgtctgcctcattttaagtggcgaagggcagccaactaaagtattgtccgatttcgaaacaattattgacggagttgctcctactactgggattgtcgataataaaaaagacgccaatattactgcgattttgcatcgcggctactgttctaaatatccagaggagtcagagcttgcttacgtccagggcgttaaagagctaggaactcataattgggagggtgatattgcattcacgaaagacaacattccggttatgattcatgatgtttttatcgagaagagtgctctaaatatggatggttctgagatcactgaaaaaactgacatgcgacttttgacgctcaaagagctgaacacgaaatatgactttggattaaaaaaggatgagcaatttcaaggtacaaagctattgacttttgatgatttttgcaagctggctaagcggtttgatgcatttgtgcacgtcgaattcaaatatccgtacacggcagagcagattaaaatcctatacgacatcgttgttaaatggcatatgcaagacaatattgcatggcaagcatttaaacgcgacatgttaaaaccgatgcaggcgttaatgcctgcagctcaaattgagttattaatgcatgcatcagacgtcatcaatgatgcgttctatgaagatgctaaaacttacgagacaggtactaaccgcgttgcaatctctatggacaacaatttcactgacgaacaaattgcggacgtcgtaaggcgtggttattatgtgattatctggattgcatggaaccaaaatgatattaaccgcctcgccgatctaggcgtgtcagcgattatgtcaaatggtttaaatatagcggaagttttaaataaatagaataagttaagatagcaatcctcctctggattactattttttataccatcattaaaggaggcaccagaattattgattgttttacaaaccttatgtgacatgctgctcgcacagttccacaaattgagccaaccgaaaatgctcatcgagactgcagctgtcgcgattgcttttaaaatcccgggatgggtgttccaccaaggccccacagttgatcatgcggtgatggtcgttgtgctagtcatcgtgatgtgttgcgattggctgacggggtcggtgctcgcacatcggtcgccggtcatgcttcacaacagccactacggcaacgaggcactgattcgcgacgccatcatcgtttttatctgcttcggcttcatgggcatggacttcgtactcaaaagtaaatcatttctattcgcagtcttcaccgcagcgtttatcgctcagaacatgaactcagtcctgagtaacgtctatgtattagggtggaccaagtattttccgatgtggcttttcagcctattaaaagatgaaattatttcaaaagtcaaaaaatattaccaacaaaaggagaacaactaacatgaaaaaattaaacaaactagcagtcgccggaatggcggctattttatttgccacaaacttagcaggcggtgtacaagcctactcaatcgacaacgcctacaagctcgccgataacgaaggctctgtttataaagccagcaataactacatcatcttgcatgatgtcggcacagaatcaaaagcatgggaaaatgccagctatctaaaacgtgcctggtcatcagcaggcgcttatgttcaatattatgtcggtgatggcggcaaggttttcgccggtggagctgaaggctatcaagcatggggcgcgggcacagttgccaacgccggttcacccgtacaaatcgaactagcacgcacgtatgacaaggctcagttcgcaaaagactatgcggcctacgttaatttagcccgcaacagcgcgatcaagtacggcattccactcacgctagacggtgccggccgcggcattaaaactcacttatgggtgacgaataacatctggggcaatcacacagatccttacggttatctagcgcgcttcggtgtcacacaacaaaagttggcccacgatttacaaaccggcttgcctgaagacggcaccgcaacagtgccatcaaatccagcgccaacgacatcagcaccaactacgccaagtaactcaacaattccagctggattcacaccagaacgtggcacattcattaacggcgacacaccaatcatggaccgtgtcggtggcgcatctgtctacaatacacgcggtgaatacttgcaaccgtacgcaagttggtcatatgacagctacaaacgcattggcaacttggtgtggattcaccaagtattcttcaacggcaccagaaatattgatgtgtttataccagtccgtgaaggttcgtatccttggggaacgttcaaataagcattaaaaaaagccctcggaggagggctaatacataatttattactacaatccggatttaattatctttattcggttctcaaggattaatttagtataaagattatcaccgtgatcctgattgtctaaagttctaccatagcgattaataagttcttgtattgcattttggtattttagcatctcttctgaatgctggatgtgatatttagtgtagtagaaagatagtgtcacatcactatcataaatagataaatagtcaaaaatactttgaaagtaactatagtctgcttcagcgagtgaatgaccaataaatgaaatgtttgttattgtatgggaaagtattgaattatattcagtatcataactgttcatcataatgcgagaagccttggtaaatctatatatttcttgtgaaggactgatttttgtgctatcaatgccgaaaataaattgcgaagtggggtctgaggtatcaacgccatgaatgttacgaatttgtgtttcaggtatgtcattaagaaaatatgtgtaattgaagtttaaaacagaaatatttttcgtttctgttccgtccaaccaagaaggttgtcccaccctaatgaactgctgctctgaagatctaaaagtgtcgctatctaggtattctttaaatgaattttcaaatttgcgtaattcttgaaataagtaatcataaatatcgaactgcttattttgcaaatacaagttagagaccaaaagactaaatttcttctcagaaggagtccattttttcatataactttcaatattttgaaaaggctggtttttcataatcatattttcaaaattagtagaaataggatttagagcatttaacattacactttctacgttattccattctggatcatccaattctagtagcttcatgtaagtgtaccagaaattatcaacaataatattatctttttggaggatagcattgaagttttcagccttaaatccttgtaaagtatcattcattatcgatacaccattacgagtatctagccatgcaaaaaaactgttataactagtgttcaaaccacgactcaagtcaaatccgttgccaacgataattagtttttcaatcataaaaatctcctatttagtttgatgtcactgatagtataccaaatcacaaagaaattaccacttgacttatacgaacgtacattcgtataatgtaactcaaaggagtggttaagatggaatatgtcagcttaaaagggactatcaatagcactgttaaagtaatcagcttcagcccgtaccttgttcggttcgaacttaaaacagccgaacaaaattataattgcctggtcgcaaaagatgctcttaattttatgtacgttgctgaagagtcggtaccgattgccatcttcggccacttcaacaagcgtcatcagttaatcgttgataagtatcatgtcaagaatgttattcagaatctttctgttgtaagataataccagaataaaagtcgggggcgcatcaaatgaaacaatttgaaccagcacgaattaacgatcagtattctttgacgttgagccaaacaggcaacgtcgaattacataaggaaggcattggtgtggtggggagcatgagctactattacacgcgcaacgacttgccattattcatttgtcgtcatgaacctacggcggatttgagaacaatccatgaggtgatggtgcaacttgatcaacagatggataaaatggtggaatgcggctgcctaatagttggcggacagaatgtagcaattcaacgaactaatgtgaattaagttaaaaaataccactctattcctatataatagagtggtattttgacgtttataattcatacacttatacatgagataatatgcattattttagataagtcaaaatcgtaattttaagcaaaaagttgtccgaacgttgtaccaattccttaaagttaattgatttttgttgagtattgatttttatgatttgctgtaataacagcagtttgagtctcatttacgcctattgcagtgtccaaagttaattggaaggcagtgtggggtaattgaattgcataagctagaaatgcttatttgaaggcgtttctggctttttttgtttgtgcatgtagaaagtaacaccatttggatagaaatttttagagagatttaactagtatgcagtattaaatggtatgataaaataaaaattataggaggtatggattgaagtcaatatttgaggcagattttaagagacattcagaaccgcgtttaccttccacagctcaaataaatcattaatcgcgattaataacttatttgaaccctggaaagcattaaatcaggcggccatttggctcgtaagtgttgcaatttcaacttgtaagggggtctggtagcccagtgaactatgaattctcttcctattgtagaaagcatgcacatattcaaaaaggacggcagcggcagtttcataatggatttaagccaagccgtaaacgcccaccaagtgaacatcaatcaattttgtgctacgtacctcaaccgactagcggccggattggcccaagcggacgaggcgattggtgctcattattgcaactggtcggcgattattggccgacgtttgcaaaatgggcttgtcattacacagcttttagcggatggcacgttaattctgagcaatggctcgcaagtggcagtcggccaaaagattgattttaaggaggagctgatttaaatgacactatcggttgccagaaaagttagcttagtcgggatgtgcttggcgttattaatggttagcgctcaagtcagtctaccgatttcgctggttccagtaacactccaaacgctcgcagtcggtgtaattggcaccacgttaccatggcgcttaagtcgactggtcatcgggagctatctcatgttaggcatgcttggcttaccggtctttgcaaattatgccagtgggactgcagtgctggtcggaccaacaggcggctacctgataggctttatcgcttatgtggcaattgttcactatagtcagcaactatttggacaatcgaaccgcgtacttctcggcggcaatgtgctagcaagcattattcaactcggatttggcacactctggctaatctggtcattaaaattatccgtagtgaccggcttaatgaccggttttgtgccgtattttccgattgaaatgatcaagagttgtttagtggtgatgattgccagtcgcgttcaatcaattagttaaaaaaacactatccaatcggatagtgttttttagtttaacgctttaattttagcgattaacgcgttatttttaaggtatttggcaaaaactaacgcggtttcgcgatcttctgcatagtctcgaccgctttgttggcgtgcccgagcacggaggtaatacaaatgatcgacttgtttgatgatttgatttttttgactcagtttgagggctttcgtcaaaaactcgatagctgcatcaatgcggtgttggttaatcatataggctgctgtgtgacgcgaagcaaataggacgcgttgaacatcaatgacattgatgtgatcaagttggttgatgaaattgatattgttattgaaataaaaatcagctaattcctcgccagcttcttggtaaattaaacccatgccggtatttagaagtaacttcaacgttgaagtgtcgtcaccgatagccgctgtgaacgagttataagcggaaaaaatctgtaattcagattgatggtcaaggtaacttaaatagccattgaaaaagaagaagacggcgggataaggatgttcggttgccttgaagtcgatatcggtaattaatgcggcagcagggccagaatcgcctgctaataaagcaacttccgcagaaatcacgccttcgtcactggcagtgtcgagcgcgttaaattcggtgaaaagttcatttaatgtcaatccaagccgtgtacaaatcttaattagaattgggattgtggggggtagatttttcttttcaattttgctgattgtattttgcgtgcaaatccccgctgctaattcagactgtgtcagttgcttgttgagtcgctgttgatggatcaattggcctaaaaacatttttagcctccaaatagtaattatttatctatatttatgattaattatatacgtttaatgcagacaagtatacgtttatgatatttaatccttttaaaaaaattacgtgataaaatcgaaatgagtcaccaatcatgggtattcataatatgaaaggaggggtatgataatgatgagtaacattcaaaatttaattttctggttttggaattaaggttcgagtagggagttttatgcatggcaatgaaaatgccgctggcaatgcagattgtcattaatctaagtacgtttagttcgtttctactattagtattatttttgacggggaagttgaaacgaacgaacagatttcaactactattatcagttggagtcggcattgcttttgttcagggaatggatttattaattggaaattttcttgaagagctatggctgattttggcaactgttggattatatggttggttaaatggctttaaaaatctgcgtaaattaaagacaagttatgcgttaattatcgcaaccatctttagttacatcatcgtgatgctatcatcggttctaacaacggtggggttaattgggtatactcacttaaagggccttgataatctgatgagtagccagtttaattggcaaatggtgtgtttaattatgttgagtcaattattgattgcagccggattaggattaattgtccaacggttagatcagcttattaaagcatccattgcttcatacggtatgtgcgtggccggcacgattttagccggtctcgcgttatttgtggtggcagtgatggtgctttttgatagctttaagcatgcgaatctgccggttgaatatttgtaccttgtgttaggacttgtgctattactattagttttggtgattgtgggaatgcttttgtatacgaaagctgtgattcgccaaaatagaatcaacgtagaacaagaaagtcagcgaaatctaacgctgtatgttgaacagttagagcgtaactaccgtgaaatacgcaagtttcgccacgatatcgccaatgctttattggctttagagacaattatcaatgaacaagggagcccagttttaatgcaggattttcatgatttactaacgcattataactttgacacgattcaagatcaggcaattggacggtttcaagagattaataatgcttatattaaaggcattatttttagcaagtatattgaagcacataataatcggattccctttaatttagaggttcaaccggatttatttaagcaacaacaacagtattttgatgaattacggattctgggaatctttttggataatgcaattgacgcggtaaatgatattaaagatggttcaatcagtgtcagtttattcgagcaaaagggtaagatggtctattgtgtcaaaaatatgattaatacaccagtagaatttggtcagctttatcaggctggttattcaacgaaggggattaatcgcgggcttgggctcacaactgctaaagaaatcacggatatgcgctcagattttagcttaatgttaaaacaagatggagactatttcgttgcaatgcttgttgttgaacaggaggagacccatggttgatatttttttatgtgatgataaacaggttttactagatagttatgaagagattataacggcatatattcaacaaaatacattggatgctcaggtgcgtttgaagactaagaatggctatgacctattaatttttttacaagaaagtcaaacgcaagggggcgtttactttcttgatattgatttagagaatgacgtgctggatgggatggaattggcgcttaaaattcgtgaattggatccatatgcacagattgcgttcgtttcaacgcatgacgaacttttaatggaaaccattcaacgccgaattaatgttttgaattttattttgaaggatcgcgggttggcgcaggttcgcgcagatattcaagcaaccattaacgatgccattaagttacgacaacaacaggtgccgttagctgaagaaccagcttattttgaatatgatgatggattatcgtttgaaaaagtggcaattcaagagattaattatttcgaaacagcgcataaagcacggcacgtcttcttacacagtgatcatcggttaagtgaatttgtagggaaaatcgtgacgattcaagcgcaattgccacaatttttcagagcccataagagtatcctagtgaatccggacaaagtcgtacggattgataaggagacacatcaagtgatatttgcaaatggcgatacatgcgatgtctcgtaccgtcgaattgaggcattacttaaattgatacaagcagacaagtattaaaaattaagcaacgccaaaaattcgctttcaaacgtggtacactaaaattgataatggatgacagttttaggaggctacggattgaaactatatacaaagaccggtgacaagggattaaccagaattatcggcggtcaaaaagtgcgcaaaaacgcaattcgtgtggaagcatacgggggtgttgatgagttaaattcatacttaggtgtcgtcatcagtgatttacctgattatccggcattgagaatggaattggttgagattcaacaaattctgtttgactgtgggacagatttagcgacgccggatgattcgcgggggtatcggacagacaacgcatacacgaaatggttagaagctaagattgatcagtatgcagatgttccacctgctttaaaagaatttattttacctgggggagtaccatcagcagcgaaactacaatattgtcggacaattgcgcggcgtgttgaacgccaagtcgtcgccttgcaggaagtagaaccgattaacgaagctgtattaactttcttgaatcggctctctgattatttatacgcgattgcgcggtacgtcaatcatgaagagggcgaaccagagacagtttatcgaagaaataaaacaatttttcattaaaaaaaccgccgatgtgcggtttttttaatgtcgaaattaagggatgttttgaattgctaacgcagcaagcttccactataatagcttgaaaagaggaagtgattgtgatgtttaaatcaaaagaagctaaagtcgaggtttacgaaatgctcttaaaacaacaagctgctttgctggcaggtgaaacgaatttaattgctaatctagcaaattcttcggcgttattaaatcaaatattaccggagactgtttttgcgggttattatctgtatcaagatgctgagctgattttaggcccatttcaaggaaacgtctcgtgtatgcacattgcactaggtaaaggggtgtgtggtgaagccgccgcaaagcaaacaacgttaattgtagaagacacggcgcaacatcagaattatatcgcttgtgattcggctgcacgttctgagattgttgtgccaatgatcaaggctaatcaactaatcggtgttttggatcttgataaccgcgtcgttggcgcttacgatgaggtcgaccgagattatctagaacagtatgtcacgttactgatgcaaaactaaaaaaagcaaatgcgtttctaattgatgttagaagcacacttgcttttttttaattgattagagtgtcttgattttttgtttgaggtggacgcaaacctgtgtcaccacaatgattgccaagagccggtccagataatccgtaccggcttgaaccagtgtaatgctgacaaactgatttagtcccaagccgcttagtagttgtacaattaaacttgaccctgaagaggtgataccgtggaacaagaagtaagtaattaatgaactgacaattgtgccgggaatggcgacacctaaagcaacaaggggtaactcgcgtttcgtccgttggtggtggtataagaaccatccagcgagtaagccggttaatagaccgtctggcaagtaataaagcgcaaataagtcggtcgtgacaccgctgatgatgctactgcaagtggcagttaatgcgcctgccagaggacctaatagggtgctggctaaaatggtgccgacgctatcgagatagattggtaaccgtaaaaatagggcaatgttagcgcctacgtaattgagtgcaatggcaagtgccagaatggttaagtgttgtgttttaaattttcgcataataggttccttatctaagttttggtaagtccgttttaatgagggttgcttgtgcatttaaaacgacggtcaaaaactgttcaaagaaacgattggtgtccaccttagttaagatgaggctattggcaggacggtgccagaaatcgaaccggtcaaccagtgtttggccaatgctgatgccggttgtttcgacggtggtataactttcaaagccgtgacaaagggttggatcgataaaataggcgactgctaatggatcattgatcacacagccgataatgtgttcatattgccaatgaaaatcaaaataaaactgggtgatggcttttagatagtcgccgacttcaggattgacacgctgacaataagccagcaatgttggcgtgaagacaatttcgcgggtcacgtctaagccaaccatttcaatcttttgatcgagttggtcgaataccaacagtgcggcatccggatcgctccagtagttgaattcagcaacgggtgagcagttaccgtgactcttataggtcccacccattgaaacaaagcgggcacagtgccgacctaaatctggattccgctggagcgcagtcacaatattggtcaatggtccgagtgcgataatactgatatcgctcggttgactaaaagtggctgctaaaaaatcagcggcggattgttgtgccggttgaatagtggataggcgcgggatatggctgtcacctaaaccatccatgccatgcgtatcctgcgcactgacaaatggtttatggagcggtttatccgcaccaacataaacgggaatgtcgagccgcccgaggcgttcaagacacttaaaggcattgtccacgccgatttggacgggaacgttgccgcaaacaatggtgattgcaacgacttccaccgctggcgattgaatggccaaattcaaagcgagcgtgtcatcgatgcctggatcgcaatcgataatgattttgcgagtttgcatttatttctaacctccttgagatccttagttttttattctgggaagtttccgaaccagtccaagtagttttacttgattttaaatgcacccctttatgataccgagttggtgggcgggtgtaaatagcagttatttttaaaaaacaggcttgacagtgattagcgaacttgatattataataaacgttgtaagatttgatatggagaattacccaagtctggctgaagggaacggtcttgaaaaccgtcaggtgggttctgcccacgcgagagttcgaatctctcattctccttaaagtaaaaagcggttcgcggatgcgagtcgctttttttgttgggtaaaataaaaaaccagagtgcatgcgcactctggtcgattcggtttaaaattagtttgtgtaggtttggaaacgacttgcatcggtattgtagtctttagcatcggctggattttcgattgaaccaaatggcatttgcgcacgaagtttccagtttgatggaatgttccattttgcagtaacggcttcatcaattactgggttataatgttgcaagctagcgcccacatttttttctgccagggctaaccaagtggcatattgtgccatgcctgaagcttgttctgaccatgttgggaagttttcggcatataatggcacgttttcttgaagattcttaacaacgtcttgatcttcaaagaacaagattgtcccgacaccagcggcgaatgaagccaatttagcttgtgtacttgggaagttttccgcaggtgttaatggttttaaggcagttgctgtaatatcgttccaaagtgtttcatttgcttttccaaagagaataatggcgcgtgaaccttgggcgttaaaagcagttggtgtttctttaatggtgttgaagattaattctgataattcagcttcgctcattgaaacgtttttgccaagtgcataaattgtccggcgtgtttgttgtaaatcgaataattctgtcatgttcattactcccttgtgaaatcgtttttatcagtgcatgcgaataatatagcatacttattaaatgtaagcaatgaaaaaagcgaaatccctcgtttgtattttgcaattaacagcatttagttcgattgtattttacaattatagactagactgcagtttaacgggcaattcagattttgaaacgacagtccaagaattgacgaagcgtcccttggcatctaattttaagtagtgattaggttttagtgcgcgcggcgcttggaaaacgacttcgtaatgactgccatcagcacggtaagcaggttgccggtaaaggtaatcgccatgtgcttgttgtgtcccgtattggtgtgctgttttaacatagacggcttctctgggaattaagaggttgaaccggtcccactgttgggcaaggtcattgccgtccgtcatattctgagttgtggctgatccgataattggaccgccgataacaattagtccaagtgagaacagtaatagaatgatttttttcatgattgacactccttgtgaattgatgtcttaatcgtatcaagctagaagttacattgattcagtctaaaggtggaatttattctaagcgaggtgacgattttgtcatatcgtgggcctgtttaaggattgatagtttatgtctgtggccgaatgcattataatagttagttatgagatgttttcagtagagagtgggtgatgattgatgaaggaagttcaaaatgtgatgcaacagttagacgcgattcgtagtgcattgattaaaggggacatctatcaatcaattccggaaaaagtattggtcgtcatggatggcgtccaatataagacgcggcggacacatgtcgtagtacctgaggacaacgagtcagtcttgcaacgaatcacagcaattgatgagcgaattaaaaccaaaggcaaagaagcgaccatcagcgatgaagagctcgatgatttattaaggcatcttgcaagcccagattcgcaagtgcgcgataaaggtgttttttacttattcaatcgattattacggcagacggttttaaccccagcccaattgatttgggtcaaggaccgcttattgcaagatgattatttattcgcgcatattttagaacctgaaaatgacgctgtttttttacgttcgtttagcgcgatgtttttggccgggattttatatgctaaccgcactttttatcatgtattaagtacggccgaattattggcaattgaacggcgagtaatggcttatacagtcatcgaattagattcacgaggatacgttgatggtaaaggctgggcgcatgcgatgacgcatatcatcaatgtctggtcagaacttaacgaaacacctgaaatccaacgtgcggataagattttgatgatggcaattgtgctacaggcgtatcgcttctctgataacgcactcgcatatggtgaagatagtcatctgacgaacgttctaatcagtttaatgaacaagcatcaactctatgtcgattattgtttaatcgtcttacaggagtggcagcgttcattgttgactatggcaccacaggagaccgttggtttttggaatcggtggtataaccgcaatcgctttttacagtcattgttgctacaacctgaattacctgataaaattgcggattacttacggaagatttcagatttattttaattaaccagataggattgagagaagatgacagtaaaagggattatttttgacgtcgatggcgttttagtggatagtgaaccgtactattttgaacaacgcttagcatttttgaatgcaattggcgcacgactaacggcagaggaaagtcgtaaacaaattggttccaatatgaatgccgttttaaaacagttgtttccaaaccatactgttttggaacgagcggcaattaaaaacggctatacgtcgtataaagcggctcatccaatcgtttttaaaaatatcatgaacccagacgcgcaaccgttattagcaaccgttgcaccgacatatcaaatcggtttggcgtccgctggtgagcgcggaattattcaacaaatgttgttggaaaccgcgttagaaccttattttgaaacggttgttagtggtgcagagattgcgcataataaaccagcaccagatgtgtatctagaagcgcttaaaagaatgcatttagaaccaaccgaggcggttgcgattgaagactctgcactggggattcaagcggggaaggcggctggtttaaccgtcatcgcattaaaaccatttgatccacttttcgcgattgatcaatcggcagcggattatcaaattgaatcattaaaagaagttccggcaatattagcaacgttataaaaaacggcttccgctgcaggaagccgttttttgtcgtactatcgaacagcactttaacaattaattaaagataaatatttggtaatgtttagtatgtagtgtaaaatacttattggataaaaaaataagtaatgccacataactagttcatagtgtataataaacgcaactagtagcgtcattgctaattgatgtaaattacttaattgggttatattttccggaaattaattttaaattaaataatgatgtaattggagtatttaaaatgagaatattaggggataaactaaaacaaatccgtaaagcacgggggatgtctcaagcggagttagctaaggggatttgtacgcaagcaacaattagcttaattgagaaaaaagaacaggtgccaagcacaaagattctcttagaaatttgtaagcggcttgaaattacgttggactcagtgattgtgcaagaagatgatcaattacacgtcttgttgagtcgtgtgcaagcattgttatttactaatgaattcaaaaaagcacgtgatttgattcagcagatctacacagatcaactggtcaaagcagatgattacaaacggtattattatttccaaggtcaaattaagttattgctggagaataaaccggacgatgcacttttctttttcaatcgtgccttcaatcaatacgttgtttctcagacggatgtttacggtattctatgtattatcggcattagcaagtcctatttgatgaagggcgctttagagcgtgtacggatttatgcagaacaagccgttgaaatgttggagaattctgatccacttgctatggccgatttccaagttgagttgcagatttataatcacttagcgggaattctttttgaattgaaggattatgaaggtgcgattaagtacgctcagcttgcgattgacgaagcaatcgataagcaaagtctttacttacttgatgcattgtatttcattcttggtcgtgcagaacatgcgcttcatcgagagaacgccttacaggatttaacggttgctaaaacattggcgttaatccggcatcatccagagattattgtgcaagttgatcaacaattggctgaataagtggttaaccactaaaaaaagccgggacataagcgtcccggctttttgattgctaatttatgcttcttcgtgaccaatgctactgcgtttcttgttgagtgcgtgtttattatctaaatctgtccgcacaacgagcacgtcgcaaacggcggtccgagtaacgtattccgttacagaaccaatcaagagacgttcaacagcgtttaaaccagttgcaccaatcatgatgagatcgatatttttcttttcgggtacttcgcgggcaattaaactctttggtgcgccatattcaatgctatagtcaacatcttttaagccaagttcattggcagtcacgatgtattcgtccattgttttcttagctgtttctgtgacttgttcaaccattgcggaatcaaaactagagatattttggaaggcgcgggtatcgataacgtgaatcaagtggagttgtccgttattccgaagggcaacttcaactgctttacggaaagcgagttcagcttcataagaaccatcgattgcgaccaaaatgtgcttgtattgttgtaacattgtcatcacctcatttaattttacatctttattatacgctagttcagtgccaaaagtaaatcttaaaggttagttgcaaagctaaggccgactaagccggcgattaaactggcagcaacgagcgtcaccaatgtccagactagtggcaatagccagtaaatcaaagccccgcagatcgctacaccgatgagtgaaatccctgaaaagtacatcaatcgacctaaatgccggttttcagttaaatcaaagagtaggaacttcttgtcttggtagtaacataaaatcgcaccaagtagggcgataatgattaaaaaaacgattatggcgatttgaatcaatgtgcaacctcctaaaataatcaacaaaaaagggccaacgtaaacgttagcccggtcaaagtcgttggactttgggaaatctagtggtgccgtagatgcttcccgatagttgagcccgctagaaaatgcaggtgggtcagattattattagacttggttccttcgcgaaaaagtctacactcgctaataactcatccgtcccattaacgaattacttgatcggtcaacataaggtgggaagacgcgcacaccttagaaatcctactattatagtagcacgctcgtgatgttaacacaacacttttgtaaccgttcacttatgcggactggcttggcgcaagcgttctagctgttgtttgaggacttgctcgtatttaccagttgcttttgcttcgtaataatgactacctaagagcttatctggtaggtaatcttgcgcgacccagtcgttgggataattatgaggatatttgtagtcgacaccgtggccaagtttttcagcccctgcataatgggcatcacggagatgatcggggacttcaccggctttgccagcgcgaatatcagctaacgcgttatcaattgcggtgatggccgaatttgattttggagataagcagagatcaatcactgctacggccagtggaatccgggcttcgggaaaaccaagttgtttagccgcagcaattgcctcgactgtacgggcacaggcttgagggttggcgaggccgatatcttcgtaggccattgtcatcaagcgccgactaatcgacattaaatcaccggcttcaatcaaacggcccatataatggagcgcagcatcaacgtcactgccacggactgatttttgaaaggcggagatgacatcgtaatgggcatcgccatctttatcatgagtaatggcttttttctgcacgcattcttcaataacgtcaatatcgatgtcgatgacgttggtgtctggattcgctggtgttgaacgagcagcgagttcgagggcgtttaaagcactccgtaaatcaccgtttgtgacgcgggcaaggtattgttcagccgtttcatcgagattgatggctagtgcacctaagcctttttctttatctgtcagtgcccgttgaatggcaacatgaatgtcggcttcagtgaggggcttgacttcaaaaatttgggcccgactccgaatggcagggttgatactgatatatggattttcggtagttgcaccaattaagataatgcggccactttctagatgtggtaagagaaaatcctgtttggttttatccaagcggtgaatttcatcgaggagtaaaatcacggtgccactcattttggcttcttcagcgacaatctgtaaatcttttttactatcagtggcagcattcagcatgcgaaaagcgtactgggtactaccggcgatggcactagcgatactcgttttaccagtaccaggcggtccgtagagaatcattgatgagaggagtttggcatcaaccattcggcgaatgattttttgcggccccactaagtgcgtctgaccgacaacttcatcgatgttagtcggacgcatgcgaaatgcgagaggttgttgcatagcgttcatcctttaatgtttaggttgttcctagtataacatgtcgcgcaaattcgtagtgattatcgttttaaaaggttttagggatgtgtataatgagttgtataagactgaattaagaagaggtttcaaaatgcctaatcaattatttgagaacattaaacaattacgcttaacacctttattgaaccaaggtgcttttggggtcgaaaaagaggggcagcgagtgaccggattgggcgcattgagtcaacaaccgcaccccagtgagttaggatcgcgaacgtttcatccatacattgcgactgattttgcagagatgcaaacggaactggttacggataccttcgaacagaccgtagatgtccaacaacaattattagcgctcgaacaagtattgcaatcaagtatggccgattcggaatatatttggcccctcagcatgccaccgttgttaccagacgatgaattaaccattccaatttcagaatacacaccggcggtaaaagcctatcgtgactatttgacgaagcgctacggtcgacgtctacagatggtctctggcattcattataattttagcctgtcatcgacgttaattgtgcgtttatttgatgaatactatcatgatcactatgtgagtctaaaagattttagcgatgcgttgtacatccagattgcgcaaaattacgtgcgttatcactatgttttaacgtatttatttggtgcgagtccgatagcggaaccaggctttttagaagatatgacgaaattaccagaacaccctgtacggagtttacgctcgagtgaattattcggctacagcaataagcaattattaattcattttgattcagttgccgcatatgttgattcaatgcgccaagcgattgctaatggcgacttaatttcggaacgcgaattttacggaactgtgcggttacggagtcactcattggatcagatgttagagactggtgtggattatttagaatttcgggggtttgatattaacccgtatactgcgacggggattgatcaacaacagctagacttcttacacttattctttatgtacttattatccttgccgaaattatccggtgatttagccactcagattcagacgggtcgtcagttaaatgacacagtagcattagagaatccgctgcagccatcgcagctccaaacacaattgaaaactgtgatggccgatttggcccaattcattacggattatcatctgaatgagcgttttaaacaagcttggacagtgatgaatgagcgtgttcaggaccatcgacaaaccttgagttatcgcttaacacaagcgattgaagaggactcgctaaaggcatttgccctcaaacaggcaaaacgttttaaatgtgagctgacagagactccctatcagttacagggatacacggatatggaattatcaacacaaatgctgatgtttgacgctttccaaaaagggctgcatgtggctgttttggatcgcgatgaacaatttattgagctgacctatcaacatcatcatgaattagtcaaaaatgggaatataacgagtttagatcggctaattagtgggccgttagtggataataaggtagtgactaaaattttattggcaagtcatggtatgcgggtgccagcgggtgccgaatataccgctttagagacggcagtagcagattatcaagcggcgtttggtcagcgcgcgattgtcattaaaccaaaacacagtaacatgggggcgggcattaccacatttttaacgcgtccaagtgaagcggacttcattgctgcttttaagctggcacaaacgtacgatcagcaaattttagttgaagaattcattgcgggttcggaataccgtttcttagtgatgaatcataaggtccaggctgttttagaacggattccagccaatgtcgtgggggatggtcgttcaacaatcgcccaacttgttgctaagaaaaacgacaacccattacgtggcgaagcgcacctgacaccgttgcaaaacattcgcctcggtgaacgggaattgctcatgttgaaacaacaaggttaccgccctgaagatgtgccattgcgtggttcacaggtcttcttactacaaaattccaacgtctcaaatggtggtgattcggttgacgtgaccgatgagatggatcaaagttactttgcgattgctgaacaggttgctgaaattttgaacctcaatatcacgggaatcgatatcattgtgccaaacttataccaaccatatgatccggagcaccctgagatgacggttgtgctagaagcaaactacaatccagcgatgttgatgcacttgttcccaatgatgggtcaagcgcggcgcgtttcaatgactgtcttacaattacttttcccagaattagcgattgaaaccgactaaagtaatgcaaaaaggcccgcacaagttaaactgtgcgggcctttttagtgttaatcgaaaagatgttttaagaaaccaccttttttggtgggtgcatcttgcgttgtggtttttggatcagggtatagtgtatcgagcgtaattgcctcatggttaatcgcgtctttggcaaccactaacaaaccgaaggccgttggttcggttttggctgtttcgttgttaacgagcgtgaacggaatcccgtgtgctgaaagggccgctaaataatcggtagcagcggggttcttgccgtttaataagacggaatagggcttataatccgtaagatgcgcttcgaatttagcttgcgcagtggcgagttcctggttagtaatgcctaagaagacgcgttcacgtaatgagccgaggtagcggcggcgttcatcgggattggtttgtggtgcgccgtgcatggcactatccaagtgttgttgtaattgatcattatctgacaaaatagtcgcctcatttctgaattgtgctatattagaattaaacctaagtataccatgttggaggaaaaagatgtttacacgtgctgattttgatatttttgatgaccaaaccttaaagggccggttagacaagatttatacgcaacttgatccaaagtttgaagtatttggtgtgcaattgcaagcagaactcgtagtagaaacaaaacgcgaattctcgttgcatattgccaagcatttacgccgcttcaaaaatccaccaatgaatacttggatggcacttagtgagagctcacgcgggtataagatgataccgcactttgaagtcggtttttgggatgatcggatcttcgtttggtttgctttaatggctgagatgccagataagacggattacgcaccgttattggcaagccaaacagaaagcctcttaagggactttgccgactatgatttaagctacgatcacatgaccaagcaaaaattcccaatgtcatcggagaacttgaaactgattcaagataagtttgctaagaccaaaaaaggggagtggctcctcggaaaagtttatctgaaagacaacccattattcgaccaacccgaagctctcatggccgatattcaaacgaccttgatgaagatggtgcctttatatgagttggtacagactaaatagattaaatcagacgcgtgtgctaagtaggcacgcgtctttaaatgcgcaaaaaaagagccagacctaagtctgactcttttaattgaacagataattgcttatctgttgtagaattcaacgattaaggcttcgtcgatttctggttctaattctgaacgttctggtaaacgaacaagtgaacctttcattgtgtcagcatcaaagctaacgaatgaagggcgaccaactgtgccttcgattgcatccttaacgattacaaggttcttagatttttcacggattgaaatttcttgaccaggttttacttcgtatgaaggaatatcaacacgtttgccatcgacagttacgtgaccatggtttactaattgacgagcttgtgcacgagtgcttgctaaacctaaacgataaacaatgttgtctaaacgttgttctagcaagatcatcaagttaacaccatgcttgccttcgcggattttaccagcgcgagcaaataagttccggaattggcgttctgttaaaccatacattaaacgaagtttttgtttttcgctcaattgcataccatattctgaaatcttaccgcgacggtcgttaccgtgttggcctggagcgtaagggcgacgagcaagttctttacctgtgcctgatagtgaaattcctaaacgacgtgaaagtttccactttggacctgtataacgtgacataaaaaaatcctccaataaatgttttggagtaaaataatccgatgtaaacttagtaatcgttcagttcacttattaacaatcttcacctttgcagccgcaaggttacacaattgaaccaaaactctgggcaaatgaactgttgacggctttaccgtttactgctgcattattttacacaatggctagtatagcgtacggtgtgcggcaacgtcaagcaaattcagattaaaattgcagcttttctaaagtttatcgctaattattgctgaaccgttatcttattcatgctataatcaaacatagtttaatgaattgaagtggatgaacggactaacaaatctgatttaaattgtaaaagggtgtgtctttgaatgttttacattctcattggaatcgtagtcgtcgcactgattggctacctaagtgttgttttttatcaacgttattttatcaaacaaattaaacaactagaagcacataaaggcgacttaatggcgttgccgattccggaacgcttaacgaagttacggtcgttacatttgacgggcgaaagtttgcaaaactttgatcgttgggaaaaacaatatgagcagattaccaaccataacttcagcacgattgaaggctatctttttgatgcggaaacggccaatgccaaataccaattcattcaggttgcacggattctcaaacaattgcgggcgtacttgactgaaacggatcaagatttactggatgttcaagatgctttagaaaatctacttgccaatgaagccgatacacgtcaaaaaattcagcgtctacgagaacaatatcaacaactacgtaaacgtttgttgactaagagtttttcgtttggacctgcattagatgcgcttgaagcaacgttaggtcgcttagaggtggattttgacgaagccaacgagctaacaacagccggcgaccatctaggggctaaggccattttgcagaaattaattactgaaacaacgcaattagaagaccagatggaacggattccaaagcgctataacgaattagctaacgagtttcccgaacaactggttgaaattaatgatacctaccatcaaatgttaaaagaacattatcaatttgatgatcggcagattgaagtcaaacaacaacaactaatggatcaacttgataagagcactaccttgttaagtgatttggccattgagtcggttgaagccaataacgatgaaattgcacgtggcattgatcaattatatgatcaattagaagctgagatgactgccaagaaggcagtcgcgacgcaattgccaaccaccgcgacattcgtgcaacatgctgaacgtcagaaccatgagctattattggaactcgatcatctcaatcagagttatgcactcacacatggtgagttggcaagcgccaaacaattacaaaagcaaattggtgaagaacaggcgttagttgaagggcaccaagcgaagattgccaaccacgaagcggtttacacggcgattgctgaagatttgaccgagattgacgaacggctaactgtcatcgaagaaaaacaacaagcaattcatgatcaggttgctagtttgcatcaaggcgaagtcgtcgctaatgaaaacttacgccagtttgaacttgaactacgtaacttgaagcgcgctgttgaaaaggttaatttacctggtttacaacagaaatatttggatttcttcttcgttgtttctgatgagattcaaaaacttgatcatgatttgaatcaaattaagattaatttagacgatatcgcgaagcaattaattctcgttcaagaggatttagatgaattgaaggccaagacggataccttaattgacagtgcattgattacggagcaattgttacaatatgccaaccgatatcgtgcagattttcccgccatccaggaagcctgtgtgacggtccaaaccatttttaatgaagaatacgactatgctaaagctgtcgacttattggcaacggcccttgaaaaggttgatccaggtgcttacacacaagttgaaaaggcctattacgaccaaaagtcagacgcaactaattagtcacttagatgctcaccagtccgagacaagacgcattttgtctcggatttgttttgttaaagattaattggttgtctttaataaccaatttgctataatgtacaacgttaaaacactaatttttagtaagaaggatcgatatgatttattttgacaatagtgccaccactaaaatcgcgccaggcgcacttcagacctatcaagcggttagtgaacagttcttcggcaacccctctagtttacatgtgattggggaaaaagcctttcatattttagaacaatcacgccaacaaatcgctgatttattaggcgtagaccacgatgaaatcttctttaccagcggtggaacagaaggcgataactgggtcttaaaaggcacggcaattgaaaaacgggcgtttgggaaacatttaattacgacatcggttgaacatccagccatcattaaatccatgcagcaactggaaaaattaggctttgatgtgacttatctacccgttgatcagtttggtcgaattgatccggctgacttaaaagcagcattgcggcctgataccattttagtttcgatcatggccattaataacgaaatcggaacgtgtcagccacttgaagccattgctgatattttgaaggattatcctaatattcatttccacgttgatgccgttcaagggattggcaaaggcattcaagaggcgattttcaacgaacgcgttgattttgtgaccttatcagggcataaatttcacggcccacgggggactgggattttgtataagaaacgcgggcgtcatttagcgccgcttttaaccggtgggggccaagagcatgatttacgttctggaaccgaaaatgtgccagccatcgcggcaatggccaaagccttacgtttgttattgaccgatgagactgaaaaagtacaccgccaagcagctattcgagaacgactctttaaccatatcagtcaatcggataaaacggttatgttttcacaactgacgcctgattttgcgccgcatattttgtgcttcgcaattaaaggtgttcgcggtgaaacaacggttcatgcgtttgaagaacacgaaatctatatttcaacgacaagtgcttgctcttcgaagaaagggactgaatctagtaccttaaaggcaatgcacgtcaatgaaaaaattgcgacaagcgccattcgggtatccctcgatgaatacaatacgctagaagaagcggatgcattcatcaaagcgttcgatcaaattaacgaacgcttcaaaaaaattaattcgtaaactaccatctaaaaggagataggcatgcaatacactgaaattatggttcgctacggcgaactttcgacaaagggtaaaaaccggaacgattttatcggtcggttaaacgggaacgtcacaaaggcgcttcacgagtataaacaactccggattcaccctaaacgtgaccggatgcatatcgttttaaacggcgacgatgcagaaggcgttatcgaacgtctccgtcacgtcttcggcatccaaaacttctcaccaagtatccaagttgatcgtgatttagattctgttaaagaaatggcgcttgccatgatgaaagaaatcggcaaacctgggatgtctttcaaagttaacacacgtcgttctgatcacaatttcttcttggatacgaatgatatgaaccgcgaattaggtggttacttatcagatgaattacctgaattagaagtgcaaatgaaaaaacctgacattactttgcgggttgaaattcgccaagatgcgatttacttaaccaaccaagtgattcaaggggctggtggcttaccagtcggttctgccggtaaaggaatgttgatgttatctggtgggattgattcaccagtagcaggttacttaacgctcaaacggggtgtcgacattgaaatggtgcatttctttagcccaccatacacaagcgacaatgccttgaataaggccaaagaattaacggcgaaattggtgccatacgttggtgggattaagtttatcgaagtcccattcacggaaattcaagaagaagtgaagcattctgtgccagaaggttacttaatgaccattcaacggcggatgatgttgcgtttaacggatcaaatccgtgctaagcgccaaggtttagccatttttaatggggaatctgtcggtcaagtggcctcacaaacacttgaaagtatgatggctatcaatgatgtcacaacaacgccaatcgtgcggccagttgcgacaatggataagaatgaaatcattgaaattgcgaaggatattgatacgtacgaattatcaatcatgccattcgaagattgctgtaccatttttgcaccaccagcaccgaagacccgacctaacttagataagacccggttctacgaacaacgcatcgatgtggatgccttgattaaacgctcacttgctggaattaaagtgacagaaatcaaagctggcgatcaattcttaaatcaagacgaagaaatcattgctgaactattgtaaactataaaaatcctgagaataacagtatgttgttctcaggatttttttggggagaagattcgggatttattttcagaatgaacgccggtgacgcttgacctttggcgttcactcagctaaactattaacaacgcgttgaacaagagcgattaagattgggctagtttagagagaagatgcatggctgagacgtcttccaatgaccaattaatcggtagcttgtgagctgttaacctgaaattaagtagggctaaccggacaatttcgttcgttaacaaatcatgagttggggactagtctagtcctaatttaggtggtaccgcgaaaaagcattcgtcctattgtgaggaatgcttttttgtttgccattaaacgcaatattttaaaggagtgaacaagatgactgatcacaaagaaatgtcaaccaaatatgatccaaatcaagttgaagccggtcgttatcaagattggttagacgctgatttattcaagccaaatgccaatccagatgccaaaccttattcaatcgttattccaccgccaaatgttacgggtaaactccatttaggccatgcctgggatacgaccttacaagatatgttaatccggcaaaaacggatgcaagggtatgatgtactctggttgccagggatggatcatgccgggattgcaactcaagctaaagtggaagcaaaattagctgaacaagggatttcacgttatgacttaggtcgtgaaaaattcatcgaacaagtctgggactggaaagatgaatatgccgcaaccatccacgcacaatgggctaagatgggcttatcacttgattattcacgtgaacggttcacattagacgatggcttatcagacgctgttcgtaaagtctttgttaccttatacaacaagggcttaatctatcgtggcgaatacatcatcaattgggatccaaaagcacggacggctttatcagatatcgaagtgttgcatcaagatgatgaaggggccttctatcatgttaactatccattgacggatggttctgggagcatcgaaattgccacaacacgtcctgaaacattacctggtgatactgctatcgctgtacatccagatgatgaacggtatgcggaccttgttggcaagacggtcacattaccattaatgaatcgtgaaattccgattatcgctgatcactatgtcgataaggatttcggtactggtgctttgaagattacaccagcacacgaccctaacgattttgaagtcggtaatcggcatgacttaccacggatcaatgtcatgaacgaagatgccagcatgaatgaaagtgccggcaagtataacggcatggatcgttttgaagcacgtaaagcgattgttgctgacttgaaggaacaaggttatttgattaaagtcgacccaatgacacatagtgttggtcattctgaacggaccggtgtacaagttgaagcccggctttcaacgcaatggtttgttaagatgaagccacttgctgaaatggctttgaagaaccaagcaaccgatcaaaaggtgaactttgtgccagaacgattcgaaaataccttcacacaatggatggaaaacgttcatgattgggttatttcgcgtcaattatggtgggggcaccaaatcccagcttggtaccataaacaaactggtgaaatgtatgtcggcgaagaagcaccaaaagatatcgaaaactggactcaagattctgatgtcctagacacatggttcagtagtgccttatggccattttcaacaatgggttggccaaacactgaagcgcctgacttcaaacgctacttcccaaccaatacgttggtaactggctacgatatcatcttcttctgggtctcacggatgattttccaaagtctcgaatttacagaacaacgcccattcgaacacgtcctcattcacggtttaatccgcgatgaacaaggccgtaagatgagtaaatcacttggtaatgggattgacccaatggaagtcattgaaaaatacggtgccgatgcattgcgttggttcttaacgagtggctcaacaccaggccaagatgttcgtttcagttacacgaagatggatgctgcctggaacttcatcaataagatttggaacgcaagtcgtttcgtcatcatgaaccttgaagacacaccagcgccaacgaagatgccagatgccgctaaccttgatttaacggacaaatggatcttaagccaattgaaccaaacggtggcagatgttacacggctttatgaaagcttcgaatttggtgaagcgggccggacattgtataactttatctggaacgatttctgtgactggtatattgaaatggcgaaggaagtcctttacggagacgaccaagcagccattgccaataaacgttataacttggcttatgttttagaccaaacattgcgtctattacacccagtgatgccatttgtcacggaagaaatctggcaaagtatgccacatactggcgattcaatcgtcaatgcggcttatccagaagtgcacgctgaattagacgatccagaagcaacaacgcaaatgaatgcgttaatcgatctaattagaagtgtccggaatatccgttccgaagccaatgcaccactaagcaagccaattgatgtcttggtcaacattcaagatgcgccattaatgacgatcttcaaacaaaaccaagacttcatcgaacgcttcgtacatcctaagtcacttgaaattgctgaaggtttaacagcaccagcattggcgaagacagccattatcagtggtgcagaagtttatgtgccattggctgaattgctcgacttagacgaagaaatcgcccgtttagaaggcgaattgaaacgtttagacggtgaaatcaaacgtgctaaaggcaagttgtcaaacaagggcttcacagaccgcgcaccagaaaaagtggtccaagaagaacgcgacaaacaagcagactacgaacaacaataccaatcagtcgaaaaacgagtagcagaattaaaaaatgcataagtgcatcatcaacggttagcttctgagcatttgcctaacttagcgaattggcgctgtaagcgccgatttgataagtgtagcaaagcacaggaagctgttgatgaaaacacgttaaaaaagaagtgcgactcgagctggttaggctttgaggattaacagtaaaatgggcattgtggcgttttttgccatgatgcccattttgcagttaaccggaaaaggctgctcgaggagcacgttagtgaaagaagtgtgattggttgcgggtagcaactgagcatcaatacaaaaattccgttaattcaggttttaggattaacggaatttttagattaagcggaagttgttgcaaccaaaagcacgttaaggccaccttaaaaactgaggtggtctttttgtgtgcgccagtttttaagcatcgattcgcgtgcaatctatgctaaaatagagacagtttgttaaaggagattggcgatgttagtgacagattacgaaacagctttggcgtatattcattcgcgccccagattacataaagaagcgaacctgaaccgaatgacgcaattgttggcaggtctcggtaatccgcaagaaaaccaacaattcattcatgtgactggcactaatggcaagggatccgttgtcaaaatggtcagttgtttgattgaagagttaggtttaaaagtcggtcgttacacatcgccgtttattatgcggttcaacgagcgaattgttatcaatcaggaaccaatcagtgatgccgatttagtaactgttacgcaacaaattcagacaacggttgcccagattcaaacaactgaccccgaatttgaagtgaccgagtttgaatggatcacagcaatgatgtttctatatttcaaacaacagcaggttgatgtcgccgttgtggaagtcggaattggcggtttgtatgactcgactaatgtgttgacgccgctgatatcagttattacgtcgattggtcttgatcatcaggctctattaggcaagacatttgcagaaattgcgactcaaaaagccgggatcattaaggctggtcatccagtcgtgattggtcaattaccaaaagaagcactgacggtggttgaggaaacggcaactcgtttgaatagttcgttagccattagtggctgtgatttttcgagtgctgcggtcaaaacgttacctacttgggggcaacagttaactttccaaaatgacgcggtaacgtatcgacaattacagattccgctgatgggggattatcaaattgaaaacgccgcggttgcattacaagtattttggtgttacttacagttgacgcaacaaaaactagaggttcgagacatcaaacgtgctttaaaacgggttaactggcctgggcgcttcgaaaaaatcaacgatgagccgttaattatcttggatggtgcacataatccggaaggggtggcgcaattggttcagacaacgcggcatcaatttaaaaatcgtgacatttacctgttattcggagcgcttggtgataaaaatctggatgagatgttaccacagctcaaaaaaatagcgacgcggatggtgctgactacggttcctgataatccacgcgcggcaacagcggcccaatatgcagcagttgatgagacgattacatttgaaccggactggccggttgcattaaccgaattattagcggatgtgtcggctgatgatgtattactcgtaacgggttcgctatatttaattagtacgattcgccaatattttaaaggagaatagtcaatgacaactagaggaattatttttgatatggacggtctattggttgattcggagaagatttattaccaagccaatattcgggccgctaaagaaatgggctttgattttacacctgaagatcaccatgccatcttagggaccactgatacgtatttacgcaattattttaaagcaaagcttggttcggcaacggccgcaacagaatttattgatcgttcataccataacgtagcaacggttgttgaagcagatggtgttgcaattaagccagggttagtcgatttactagattactgtgataatcaggggattagtcgggtgattgcatcgagcaatttccgcagcatggtcgatgactttatgcaaagtactggcctacaatcacggtttagtcaaattgttgcgggagacgaagtgactcacggcaaaccgaaccccgaaatctttttaaaagcgttggatagattagccttaccagcgcctagtgccctagtattagaagactcacctaatggtgtgatggccgctagtaaagctgccattccggtgattatggtccctgatttaattgcaccaactgcgataaccaatcagcaaacacttgcgaccgttggggatttggctcaagtgattccgtatttagaaaaataagcccgttaattaacgtattgttagttaaaccaagaagacgcgtcatgcgtctttttttgtgggaggcaaacaatggcggggaatacaggacaattacaaccaagagaacaattaatgcagtacggcgcagcaagtttatcgaacgagcaattggcaatcgtcattttgcgttctggtaatagtcacctatctgttggtgaggtggcgcgcaaattgctagcgcattatcctgactttcgggatttagaacaagcaagtttaacgcagttggaaacactggcaggaattggaccagtcaaagcgattgaaatccaagccatctgtgaattgagtcaccgattgcaaacgcaacgaactctccggtttggtgtggtcgcatcgagccaaatggttggccgtcgcatgattgaaacactagcgggcgaaacgcaagaacaactgctagctgtttttttagacgttaaaaatcaaattattcagatgaaacagatttatattggcacactcgatagttcagttgcgcatccgcgggaagtctttaaattagcggtccgttattctgcagcaaaatttattttggtgcataatcatccaagcggccagttgacgccgtcaacgcaagatattgccttcactaaacgaattgtcgcctgtggtgaactgatgggcattgtatgcctagaccacttgattattggaagccagcagtatctcagtttgcgagaagagggttacttagtggagtaaaagagaacgcttttttctttaagaatctgttaattttaggcgagacctgtcaaattttctgaaaatccgttaacatagtagttacattgcgttttttattacgtaaaattatgatataatgccaatgactataaaaacgtttggtaactgaaggagagaaaaatagtgttcggattagggactagaaatatcggtattgacttaggtaccgcaaacacactcgtatacatggacggtaaagacattgtcttgagagaaccctctgttgtcgctaaaaatacacaaactggtgacgtgattgctgttggctcagaagcccgcgacatgatcggccggacacctggtagtattgtggcaattcgcccaatgaaagatggcgtgatcgcagattacgatacaactgctgccatgcttaaatattttatcgaaaaatcattaggtcgctcatctagcaagccatttgtaatggtctgcgtaccaagtggtgtgactgaagttgaaaaacgtgctgtaatcgatgcaactaaggtggcaggcgctcgtgatgcatacgtcattgaagaaccatttgcagctgcaattggtgccggtcttcctgtgatggatccaactggtagcatggtcgttgatatcggtggcgggacaacagacgttgccacaatctcattaggtgggattgtttcaagccgttcaattcgaatggctggcgacaagttagatgacgcgatcatttcttacatccgtcaaaacaataacttgttgattggtgaaagaacagccgaacaaatcaaattccaaatcgcttcagcatcaccagaacgcgctaaggaaattgaagcgatgagcattcgtggtcgcgatttagtaactgggctacctaagacagtggacattcaagctgttgatattgctgaagccatcaaagaagttgtcacagccattatcgaagccatcaaagaaacacttgaagaaacatcaccagaaattgcagccgacgtgattgatcacgggattgtcttaactggtggcggcgcattgttgaaacacttaccagaagtgatttcagatgctactaaagtgccagtctttatcgctcaagatcctttagactgtgttgcagtcggaactggcgaatcattaaagaatatcgatgttatgaagaaaaattaatcgttcagtagaagtgggacaagaagcggtcagcgttgacgtagcgcctaaattagtgacagattcgggttgtgaatcgattgctataggaaggactactgatcaccggtttttgtcccacctttacgatattaaggatggatggtggcgaagaaaccatgcaaaaatttttttcaaataagaagttaattgtgttattaatcatgctaatcgtctgcatgggcttcatcgcaatgtcagttggtttacgcaataacaaaaagagtccgagtttcgtacgccaatttggcaacgacgtaacgggcatcactaaccaagtcattagcgtgcctgccaatgggattggtcgaggggtagatgccttaacagacttgattaatacgtaccaggaaaacaaagaacttaaagcacaacttgatgatttagctcaaaccaaggttcaaacccaaaccctcaaagaagaaaatgcaagtttgaaaaaggaactcggcttaaaaggcaccttgacggattatacaaccgttaatgcgtctgttttatcccggaatcctgataattggcaaaatgcattggttatcaataaaggggccttagctggacttaaaaaagatatgcccgtcatgtctgagtctgggattattggacggattgttgaagtcaacaagactaattcgaaggttgaactcgtttcaagtacggatcaaagtagtaacggatttgctgctgtggtgaataccaaagatggtaagcaagttaatgggatcatgtccggttacaatgctgaccggaaacaattgaagctcgggcagattaagaccgatgcggcaatcgaaaaaggtgacaaagtaatcacgtctggtttaggtggattaacccctaaaggcttgtaccttggtaaggtagcagcagttaagaaagacgattttgggttagcattaactgtttatgtgaccccagctgctgatttaaacaacttaaccgttgtgactgtcatcaaacgaacgattgaaggtgagtagcatgggtgtgacgcgattacaacggcgctatttattaccaatctacttactcgttgcgttttatttggatggcgccatcagtcatttatgtgaacaatggttatatacaccagatcatacgttgattagccggctatttatgctcgtgttagtggtaacggcctttgttttaccagaggaacgccaacttacgtggtatgcagcagggattggtcttttatacgatttgtattatacggggatgatcgggatgtacacttttgcagtgccgctcattatctatacagtgcgttatttaaaacaatatttacctgactcagcctttttcattgggctaatcgatgtcttgtgtttaacattactcgagagtacgatttacatcatgaatcgcttgattggttatgcaacagtaacaccagtcgaatttattagtaatgttttagcaccgacaattgcattaaatttggtttattttgtctttttgtatttgcctttaaaatatttattgctaaaattaaaatcagaacggtaaggggtttgatttttctatggatgcagtcacgttacgaggacgcaaagaaggttttgaattaaacattgatgcgggtgcggatttcgatcaagcattagttgcactagcggaattattgaataagattcgcttagagcaaccgcagttggggagcgatcagattgaactggagctgaccactggtagacgcttgttgaatgatgcgcaaaagcaagcactggcgaccgtctttgagcagtttccagaatttaatgggacaagcattcaatcggaagtcatgacgattgaacaggctgagattgatcggcgggaaaatagtattcacgttgaacccaatgttttacgaagcggccaagaggtcaattatgttggcgatgtcttattcgtcggtaatttacaccaaggcgcaatgttaaaagcaacgggcagtatcttcgtacttggtgaagttgccgggattgtgcacgctgggtttccagataatgcagaagcagttgttgcaggtgatttatcacacgcgttacaattgcggatagcagacgcagttgagattctcgatcaccagaagacgccatttacggcacagagtgtaagtttcatcaatgatttacatgttatcgactacggtgagttaacggatttgaaacagattaatccaaaattatatcgtaaaatgaaggagcaataaaaatgggaacagctttggttattacatccggtaaaggcggcgttggtaaaacaacatcaagcgccaatattgggacggcgcttgcgcttttagataagaaggtttgcttgttagatttagacattggtctgcgtaatttagatgttgtcttaggattgagcaaccgcattatttatgatatcgtggatgtcgcccaaggccgtgctaagttgcaccaagcactgattaaagataaacgttttgatgaaaaaatttacttattgccagccgctcaaaatgcggataaagaagcgttaacgcctgatgaagtcaccgccatcgtgaatgaattaaaagaagaattcgattttgtgattcttgattgtcctgctgggattgaatctggctttaaaaatgcgattgccggtgcagacggtgcaattgtggttgcaactcccgaaatttcttctgttagtgatgctgaccgcgttgtcggcttgctagaagaagaagaaatgcggattgcgccacgcttagtaattaaccggattcggcgtcatatgatgaatgaaggcgaaacgatggatgttgatgaaattaccaaacatctttcaatttcattgttaggcattatttttgatgatgatgcggttatcaagacgtccaatgccggcgaaccaattgtgatggatccgaaaaacccagcaagccaaggctatcggaatattgcccgtcgtttactaggcgaaacagttccattgatgactttgaaacaacacaaggttggtttctgggcccgtcttttcggtaagcaataaacattaaccattgacttttgatgcgatattgaatagaatgaataacaatacattaaacgttgaacggtccaaattaattcttgaggttcagagagctgatgcgtggtggaagtcggcccttgagattaatggcacaaccgtgagtttgatcatcgaataaagatgatccgttagcccgttatcgctgtagttttagaaactacataagtttaagctgcgtgagcagtttattaaactgaggtggcaccgcgataaattcgtcctcttggagaaatccaggggactttttttattggtctaaaactaactgagttgtttgttgtgaggcaaacaaaaatttgaggtggcaccgcgaaatttagccctctttgtgttttaaacgcaaagagggctttttattttggacaaatgagaggagtctgtcatgattgactatagtttatcgattttaccagcattattaagtggggcgcagatgacgttggctgtttttggcctaacgattattggcgcgattccacttggtttattattaagtttagggttattagctaagtttaaaccactgcattatcttttagatttatatgtgtggctgatgcgtgggacaccgttattattacaactaatttttgtattttatggtttacccgtggtcggaattgtttttaaccggttcgatgctgctttaatcgcttttattttgaattatgctgcgtattttgccgaaattttccggggcggctttcaagccgttgataatggtcagatcgaagcagctgaggtcttaggcttaacttacccacaaacaatcgctaaaattatcgtgccccaaacggttaaaattgtcttaccgtctatcggtaacgaagtgatcaacttgattaaagattcatcgttagtgtatgttatcggcattggggatttactgcgggctggcaatgtcgcaagtgcgcgtgatgtcaatctcttaccacttttgctagtcggggttatttatttattgttaacagccatttgtacatgggcattacggcgtttggaacgctattatcgttattatcgctaaggaggcggcaacatgtttcaattagaaaatatcaatcaatccttcaaaggtcggcaaattttgaacgacttaaatttatcagttgaatcagggagtattttagcgattgtcggtccaagtggtgctggcaaatcaactttattacggttaatgagtgggcttgatcaacccgatagcggacggtttattattgatggtaaaccttacgaacctagtaatcgggaacaaggggcgcgcattggcgttgtcttccaagattttcggttattcccacatctttctgtccttgagaatgtgacgctggcacccatcatggtcaaaaaacaacccgctaaaaaggctaaagcagatggcgcaaaattattacagcaactagggttaagtgctcaggcgacggcttatccgttccaactatcaggcggtcaacgtcaacgagtcgcaattgcccgcgcattggcgatgcaaccggagattctctgttatgacgaaccaaccagcgcacttgatccatcgttagtggcaagtgtcgcacaactcattttagatttgaaacagcagggaatgacacaaattgttgtcacccatgatattcaatttgccaaccagattgctgatcaaatctttgaattacaaccaaacggggttcaacaaaatgatgaagcttaaaaaaacagcattaatagcggctttattgatgagcatgattggtttagcagggtgcgcacaacgcaatcagcaggctgatcaatgggcaacgattcaaaaacgccaaaaaatagtcgtcgggattgatgatagttttgtgccaatgacttaccgtgagaagaatggtcaattaaccggttttgatgttgatttggcacgggcgatttttaaggggagtggcattcgggttgactttcagtcgattgattgggatatgaaagaaacggaattgaataatcaaacgattgatttaatttggagtggttattctaaaacggcgcaacgggcaaaacgggttgcgtttagtgacccgtatctgactaatcggcaaatgattgtgtcgctcaagaaacaccctgttaatcaaatggctgatttaaccaaccaaccattaggcgttcaaacgggctcatctgggatggaacaactagagcgttatcctaaacgattacagcaaagaattgccaaccatgcaccaatcctatatgatacttataacaatgcgtttatcgacttacaggccgatcggattaaggggctcttaattgatgaagtctacgcgcaatttgaaattaagtcacgccacaacggcagcgattttcaagccatcgacagtccttttgcagcagaacagtttgctgttgggatgcgtccgcaagatcaacaattacgtcaatttatcaaccgacgttatcgggtcttacaagcaaatggtacgctagccaaattaaaagcaaagtggtttaaagaataggatgaatgaagaatgacagcaatcattatctgggggatagcactgatttggattgcaaatacaatcggggctgttatcaccgtatttcgccaacaacgtgatattgcagcaacctgggcctggctcttggtattgattttcttaccaattatcggctttgttttgtatctatttttcggaaaaaaattaccggaagatcatatggtcgatttgaaaacacaagaacggctcggcattgatgccttggtgacctcccaaaaagcagcgttacgccaagcgcagaagcaacacacgttaccgccagaaacgcagagcttaatcaacctcttcttagtatcaaataccgcggttgtgacccaggaaaacaatgtaacaattttaacggatttgaaggcggcgtatcaacagttgttaacggatgtcaatcgggcgcaagatcatatccatcttgaatactatgctttttatgacaacgaacacgggcgtcaactggtcaatctattggcttacaaggcactgcggggggtaaaagtgcgtgtgatgtatgatgcatttgggtcgcaacatttatcccggcagttctttaagccattggaagcagccggcggccaagttgtcccgttttttagttctcggttccggttcgttaatctacgctttaactttcgtaaccaccggcaattggcagtaattgatggcaataccgcctaccttggcgattttaaccagaataatcatcacgttaatattcctgcacgagatacgcggattcggattaccggcgatggtgtgttatcgtttcaagctcgctttttcatggactggaatgcggctacgcgtcaggaaaaggtgtattacagtccgcaatattttcctaactcagatgaacacgggcagactagcatgcaactggtatcaagtggacctgatcgagaactcgatgagattaagttaggctttttgaagatgattgctgccgctaaaaaacggctgtggattcagaccccatattttattccggatgattctgtattggcggcgttagtgttagccattaattctggggtgactgtgaagatcatgatggccaaacgtgcaaaacataaaatgattcatcatgcgagtttgtattacgctagacaaatcgtgaaggcgggcggtcagatttacttctctgaatcaaccggatttaaatcacgcgtaatgttagttgatgggcaactagcagcggttgggacggctaatttagatattcgcagttttagattgaattttgaaacgaccgcttttttatatgatgcacaactcgcaactgaacttgaacaatcttttacggctgatttaaaagaatgcttaccatttacgaaacaacggatacaagagcaaagcaatcaagaacgttggtcacaggacttggcgcgtttgtttgccccaattatgtaaaaaagaaccgtcagatttaatctgcactaggccctgtcaagttgacaaatgaaataatataaagttgaatctgtctctatgcggcttcactccagtattcatctggggtgaggccgtttctttgtgctgagcggttgtggtgattgaaatattcgattccttcctcaaccagtcttacaagctcttcgcaagtctttgctagtggatggcgagccatccaccgtaacttgaattcgttccaccagcgctccatcggtgcgttgtcgtatggtgttcctggtcgagacatgctacgtgtgacgttgtaacgaccaagaaagttgttgaaggcaccagaggtgtaggctgatcctcgatcagtgtgaaccaatgggtggacgtcgccagaagcctcaaaggctcgttggaaaacctcgatttctgctgctgacgtttcagtagtgctcaaattgtaggacaacaaacgtcggccgtagagatcaaggacgccactcaagcgcaccttatacttattatttacgccgtaagtcagttccgttgaatcggacaaccagacctgattaggactgtcgacgtcgaagttctgattgagcacattgtcttgaatgtgctgttcgttctccttatgtcgactgtgcttcttgacccgaatttgacatgtcaagctgagctcccgcatcacacgacgtaccatcctgaaagtaacggggaagtcaattaggtcatcatgttgaagattcaataaaaggttcccagcaccgataccttgatgatgaaaatcaaaccagtattgtgtccgttccttgagctgacgattacgggcttcccaagctgtttcttctcgatttaaccctttgtagtaagcctgccggcttacaccgacaacggccaacagcgtagatattgcaccacgcttgccttgactgacctcattaattgcgaagtaagacagtcgatgttgtttactcaccccctgcgctggatttccagcaatttttttgcgaatgcctccacaagctctttgtctgcgagctgtgctttgagctgcctgatttcaagattggctttatcgagttcagtcagctcagcttgttctttgtgatggccacggttgtccacgagcgcctcatagccgccgtgattggccttgattacccatgaacgtgcttgttgataagagacttggaagcgttcagcggcctctgtgtatgaatgattcagcttggtgacatactcgacaatttcaatgcgttcttccaaggttgttttacggctcatagtgggaacctgctttctggacggcgacgccgtcaaaggtttattcccattatacttgtttacccagtctacgacttgctgcgatccacgaagtccaaacttatttgcaagttcatcaaaggtgccttcgcctataagatatgcgtggactactttgagcttgagtttcttcgaatagtgtttgtttttcttagcctcctttagaccattaattccatcacgggagtatcgatctcgccaacgctctagcgtcttatgattaatgccatggcgattggccaccggacccagtccaatttttgattgggtcagttcatctaagattgttaatttctcgagtaccgtatgtttagatctgggcatacaaaaatccctccatagtcgtcagatgaattattgtatttcatctgacaaccataaagggattatcgcaatctgacggttcttttttagttatttgaaatagtcggttaagccggtataaacggcatcagcgactttagcttggtaattagcactgctaatataactaaagtctttatcagaattgatgtagccgagttctaagagaacagcaggccgttgattatcgcgaaggacttgataattgccgtattcaatgccgcgattgttaagcggtaatgtcttagtctgattgttgatggccttcgcgaggctcatatccttactgcttgaatagtagtaggttgttgtcccggatgcttcattggcttcattgcttgaatcaaaatgaacgctgataaaggcatcagcctttaatttattggcaagagcaggtcgcggttcgagatcgacaaaactatcatttgaacgcgttagcacgacgttagcaccagccgcttttaattttttagcaatcgcatcgacggtcgctaatgtgtagtctttttcatacttagacttagttgaaagtgcaccgacgtcggtgccaccatgaccagcatctaaaacaatggtggcttcagaaagggaagtagcgctagtcttaacaacttcattcttctcagaaggagtgacaacccaacttgcgacgtaaccggtattaccatcggcatctttaacttgataccaagtaccactcttattgatataagttagcttggtattggccgggtagctttgggtatattgatacgaaacatcaggaccagtgcgtagcttggaattatccagttgggtggtcactgatttaatcgcggagctacttgtatcagtatccgtagactcagattcagcggttgtcgttttttgaacagtcgccggagcttggtcggaaacttcgattaaatcactttgtacccaaccaactgctgagttgtatttaatctggctccaaccgttttgttggtataagactgtaatttcgtcaccttgatttaacttaccgagtagttgactatcggcactactgctttggcggacattggcaaaactgttggtgaccttagcgactcggtttgaagtggcactgacttcggtgttatcgactaaccagctagcaacccagccaatcttatcaccacttaagcgcacttggtaccaattattcttttgtgagataacattcattgtttcgcctttattggcttgactcatgacatcataagataatccagggccttggcgaacgtttacgacgttcgctttaatcgtaatttgttggtaagcagccagcgcgtgggtcacaaagagaccgacaaaaacgagtaatgctaatataataacggccggatagtgtttaaaccagctcaaaggtttctgcatttttttcaacacctttgttatgttttattaatttataaggttaattatagcaaaaaactcaactttctaaagagtttcagcgaaaaagttacaaaaaattcaagattgattgacttttttttgaaataacgttaatcttataacaataagaataagtgatgaccagtgataaagtaaaggctaagccccctacgacagagatgatttcacagctgcaagaaatcaatggcacgccgagactgcttttgaggtctgtgtggtcgcacaccgttggcaacaacgttatataattaagctaaaattaaggtggtaccgtgcatttaagcacccttgttcaacgacaggggtgtttttttatttggtatccatttggaggaatgatcatgggctatcaaaagccaaaaggaactgcggatattttacctggagattcaaaccagtggcaattagtggagaaaacggcacgcgacgtttttgcccgctatcaattcaacgaaattagaacaccattatttgaaagctatgatgtcttttcacggagttcaggtgatacatctgatattgtcagcaaagaaatgtatgatttcatggataaaggggatcggcatatcgcgctgcgtccagagggcacagctggagttgtacgggcgttcgtagaaaataaactttatgggccagaacatcaaaaaccttataaggtgtattacatgggaccaatgttccgttatgaacggccacaatcaggccggcaacgccagttccatcaaattggggtcgaagcatttggttctgagagtccagcggtcgatattgaagtcattagcatggcgatgcgtttattacgtgaatgccatattacggatttaaaactggccatcaataccttaggggatgcggaaagtcgcgcggcttatcatgaagcccttgtcagctatcttgaaccacattttgatgaattaagtgacgattctaaagttcgtctacacaagaacccattgcgcgtcttagatagtaaagatgctaaggaccaagaaattgtgaaggatgcacctgttattttggattacttaacaccagaagcaacggcgcactttgaaacggttaagcacttacttgaaacattgcacattccatatgaagtggatactgaaatggtgcgcggactcgattattacaatcacacaatttttgaaattatgacaaataataaggtgcttggtcgcggctacacaaccgtcttagccggtggccgttataatgggttagttgaacaacttggtggcccggacatgccaggggttggttttggcttaggcgttgaacgattattattattgatgaatgcgcaaaacgaagcgttggttccagaatctaaactcgatgtgtatgtcgttggaattggcgctgaaacaagtgcgacaactctccaaatcgttgaaaagattcgtgatacaggtttaaccgctgatcgagactatcttgatcgtaaaccaaaagcgcaatttaaaacagctaataagttaaacgcccaaatggtgattacaatcggtgaatcagaattagctgatcaaacagcacatgttaaagacatgattagtggtgttgaaattacggtaccacttgctgaagtctatgctgactttaaagcagtgcaacaacagttaaatcaaaattaacgcatataagatgcctcaaaagtaaatttgaggcatcttttttatttgatggcagtcaattcactttaatcctcaggaaatcctagactgctagaacactctgagcatatttgtcgctatctgtttgtatctgcttataataataaacacgaaggagtgatggatatgacagatgatttagaacaacggttaacgacggaacaatatgcggtaacccaacaaaatgcgacggaggccccatttaccggcgagtatgatgattttgatgaacaaggcatctacgtggatgttgtcagtcatgaaccattatttagttcgttagataaatatgatgcaggctgtggttggccctcatttacaaagccaattgcgcctttgacggaacgccgggaccaatcttatgggatggaacgcgttgaagtccgtagtgaagaagctaattcgcatttagggcacgtttttaatgatggaccgcaagaagctggtggattacgctattgcatcaactcagcagctttaaaatttattccagtcgaacaactcgaaaatgaaggttacggtcaatatctaagcttatttgaagagggggcacaataatggcaactgatacagcaatttttgccggtgggtgtttttggtgcatggttcatccgtttgatcagcaaccggggattatcaaggttgtttctggttataccggtgggcatgttcctaatccaacttatgaggaagtttgctcgcatacgacggggcacactgaagcagttgaaattacatttgatcccgcgattatttcttatgcggaattagttgaaatttattggcgccaaacagatccaaccgatgccatggggcagttccaagatcgtggcgatagttaccggccggtgattttcgttaactcgcctgagcaacgtgcaatcgcggaagcttccaaacaagcattaatcgatagtggtcgcttcaacgaaccgattgtcacgcaaattgaggctgccaaaccgttctatccagccgaagaatatcaccaagatttctataaaaaagaaccatttagagcagaattggtcgaggggacacgccgtgctttcattcgtgaaaattgggcgcattaattccaagaaatcctttagtattcacaaatggtatgctagaatgaaagacatcaaaagtggataggtgtgatattcaagtggacgatttagctcggaaacatcaaaatatggcgaagatttcggcagccattttatacggaatttgtgtgtcgattgcattgaactttttctgggaagaaggtggcatttacgcctctgggattaccgggttcgcgcaattcattcatacagtgacgtcgaaatttatgccgtttctaccatttccattatcaacgtcattgatgttattcgtgttaaatgtgccattatttattcttgcgtggttcaaaattggccaccatttcaccatttatacgtttattgcagttgttttttcaagtgttatggtacagattatgccctttacacagctaacggctaatccgattatctgtgcgatttttggggcggtaattaacggttttgggaccgggatggccttgaaaaacgatatttccactggtggcttagatatcattgggattgtactgcgcaaaaaaaccggccgttcagtcggttcaatcaatatcatgtttaatgtggcgctcgtttttgccgctgggttcctctttggttgggaacatgcgctctatagtatcttgagtatttttgtcaacggcaaagtcatcgatatggtttatacgcgccaacaaaaactgcaagtgatgattattaccgataagtccaaagttgtgattcaaatgattcaagacgaaatgcggcgtgggattacgattgtccacgacgtagaaggggcatataaccgtgaagaaaagacgatgttatttaccgttatttctcgctttgaaatgcatgatttagaaatggtcatgaaacaagcggatgaccacgcattcgtcagcatgacggaagctgtcaaaattctcgggcatttctatgaacctaagattaaataagataacccgccattcaattgaatggcgggctttttttatgggttaggtttcgtcttgctttttgttgcgctttctgtgacaatctaggtaatcaaaatgcatggaggtagtggaatgttattagggagtcacgttagtatgaagggcaagcagatgttactagggtcagcggagagtgcagttgattttggtgcaaatgccttcatgatatataccggcgcgccacaaaatacgcgccgcaaaccaatcgaagaattaaatattgaagcagcaaaaccctatattgaagctcacaacttaggtccaattgttgttcatgcaccatacatcgttaatttagggaatacagtgaagcctgagaacttcaagtttgcggtctcttttttacaagaagaagtgttacgcgctgaagcattaggggccactcaaatcgtcttgcatccaggtgcacacgttggggcgggtgcagatgctggtattcaacaaattatcaaaggattaaacgaaattttacgacctgatcaaaccgcccaaattgccttagaaaccatggcaggtaaaggaaccgaagtcgggcggtcatttgaagaacttgcacagatgatcgatggcgtgacttacaatgaaaagttatcagtgacgtttgatacttgtcatacaaatgatgccggatataatgtgcgtgaagattttgatggcgttttgaatgaattcgatcacattatcggtttggaccgcttaaaagttgttcatttaaacgattctaagaacccacaaggcgcacacaaagatcgtcatgccaatattggttttggtgaaatcggatttgatgcgctaaaccatgtcttacagcatgaacaactcgttaatgtgcctaaaattctagaaaccccatatgttggcgaagataagaagcataactttgcaccatatgcgtatgaaattgcgatgctcaaagcggggcaattcgaccctgatttattaacgaaggttgagcagaacgaaggcaaactatgaatttaaaacgaactaagtttggtatttttatcttaatagcggcgttttggacctttatttttagccagccagtccaggctgccgatacctatgacatcagtcgttatcaggtaaacgttgatgtacaacctgatgggagtgctcaggtcgaacaaaaaacggtgtttgatatccaagatgatatccatggggtctatatcaaccagaatctccaaacaaacgttggtcaaccaaagaagttggttaacccgcaagtcgcagttaatggtcatccgtttagtcaaagtgaatcaggtactgaaggcacctatagcttaactgatgcacaacaaaattatcggttcaaactataccaaactgcacaagatggcaatcaattagcggttactttgaaatatcagttacaaaatctgattattaattatcgtgatacggcggaattgaattggaaagtgattggcgatgcgtgggatagtgacttacaaaacgttcaagtggtaatacaattacctaccacattcaaaaaagcagacctcaaatcatggacgcacggcaatttagatgggcaacaagtcgttgaacccgataaaggccgggtaacaattaaactcgctaataatccagcaaaccaatttgtcgaaagccatattatttttccaacggcggtgactgcggcgaatccgaatcagattgatcaatcacgtcgggaagccattatcaaacaagaagcgcgtttggcgcaacaagctaatcaagaacgcaaagcacaaaaacgccgttattggcttttatctataggagcagtggtcttagcgcccggcatgttcttgttaattttacgtaaaattcgaaaaacgcttcctgtgatgacttatactggacaggcaccagaacacgtctatgatttgccagatgaaaatgggcctgcggttgtgcgtcagttgttggcattaccaattacggagacagcaggggcggagagcttatccgcaacgattctagacttagttgctcgaaagaatctaacaattgatgttcaggaaccaaagaaggaactattccataaaaaaacgccgcaattttcattaacgctcgtcaatcgcaatcagttatcacattcagaaaagaagttagttagctggctatttgatgtgattggtgatgggcagcatgtcagtctatttgagattgagaaatatccaaaacggcatagtgcaaaactgttcaatcaacattaccatgggtggcaaacagcagtggcgactgaagcaagtcgtagcgggtggttacgagaacacatcgctgagttaatgaccagtttgaattattggttaatcggccttggcgccctatttttaattttgatttttggtgctttgattggcttagttgcttggtggacgctcattccgatggggcttgtcttcattttaaccgtctggcgtagatttaatttgcaactatggacgcaattgggttacgaaaaacggggcgaatggcaaggctttaaacaaatgctaaaggatatttcgacactcgatatggcgaatgtcccagatgtactattgtgggatcgatatttgagttatgcaacggccttcgggattgctgataaggtcgttaaagctttgaagattcgattgacgccggaacaacttcaaacaatgcctctgggttattattattactacgggtatactggggggttgaacatcggtcaatcctttacaacagctctcaatagtagtgttggcagtgcggtcagtgctgctaatccaacaagtgttagtggtggttctggcggcttttcaggcggctcatcaggcggtttcggtggcggttccggtggtgggactttctagtccaatcaaatgattaggtgaaacgccaacacactggtattatgagcgttattaaaatgtaattaacgcgctaaataagtgttagttggaggaggaaagcacatggagtttaacgatgtggttaatcaccgcaaggcaattcggtcatttgacccaaacaaaccgatctcggatgaattaatcgaaaaaataatggtgtccgcccaacgaacaccgtcgtggacgaattcacaaccttggaaagtctatgtagcgacgggtgaaacgttagccgatcatttagaacgaacgggaaaccggatgaaaggctactctgatttaaacgtgattcaccggacagactggggaccgttaatggctgagaacagtcgcgtgtggaatgatgaaatcagtgcctatcttggcgaagacgggttagcgaattttagcgatttacaacgccatctgttcaacgcgcccgccgtgacttacttgacggttgagcgcaaagtttcgccatggatgatttatgacatgggggcttttagtcagtcgattctgttagccgcggctaacgaacaagttgatacaattcctgcctatgaaacggccaagtatccagatgcggtccgcaaagcaatgggtattccggaaaatgaactgttgattggtgggattgccatggggtaccgtagtgaagggatgattaatgcgtttcattcgcagcgtagttcggttgcgagttttttaacgattaaacattaacaaattaaaaaagcgttcaaatcgatttcagatttgaacgctttttttaattgacgtgatcgttcgcactgcccgcaaaatcgaggcccatgcgttcaagaataattgtggcagtttcttcgatcgaacggttggcaacattaatcacttggcaaccaatcttatcatacaggtcttgggcgaaagccaattcagctttaatttcgcccatgtctgaataagtggtatcaggatttaacccataagcaatcatccgttcccggcgaatgttattgaggacttctggtgtattcatcaggccgataattttcttaggatcaacccgccagatttcgtctggaatgtgcgcttgtggcacgattggtaagttggcaaccttgatattccgattggctaaaaagagcgacagcggcgtcttagacgttctagaaacaccgagcaacacgatatctgcttctaagaaaccgtgggggtctttaccatcatcgtacataacagcaaattccatcgctgaaatgcgatcaaaataacgatcgttcaaatgatgtagtgccccagcttcaccagttggcgtgctgttggttttagcagtaatcatttgtgtcattggtgacatcatgtcgaaactggcaatttttttcgcttggcaataggtttcggcgatttcagaaagaccgttagtggctaatgtatggaccacaattgtttcttcaggaaccgctttgcttaagacgtccatgagtttctcttgcgtgtgaacgaaggggaagcggacgagatcaggtttaacgtccggaaattgggcgagcgctgcttgtgctaattggagggcggtttggccgactgagtccgaaagcacaaaaacggttaatggtttagattctggcataaggcatgctcctttattcacttttatagcgctatcataccataattatcgaaaaaatcgctagatttgaaaaaatattcaattaattccctgtgggttattgaccgtattttcaacattcgctataatagcaaagaacggttcacgtgaagttaaatttttaacgaacgtaaacggttatacttagcacgcgaggggagggatatcatatgggcaagacagtcgttcgcagtaacgaatctctagatgatgctcttcgtcgcttcaagcgttccgtatcaaaagctggtacaatacaagaatatcgtaaacgtgaattttacgagaaaccaagtgtaaaacgtaagttgaaatcagaagctgcaagaaaacgtaagaagttctaatttcttagataaaggaaatgattgaatgagtttacttgaacaactaagttctgatttgaaaacggcgatgaaggccaaagataagttgcgattagctgttattcggagtttaaagaccgctttaactaacgccaaaattagtgcggggcaagacttatcttctgacgaagaattaagtgtactatcatcacaacttaagcaacgtaaggattcattagctgagtttgaaaagggcgatcgtgcagatctcgctgaacaaacaaaagcagaaattgaaatcgtacaagcttatttaccagagcagctagatgaagcagcagtggtcaccattgttgacgaagcaatgcaggctactggtgcgacaagtaaggctgactttggcaaggtgatgcaatatgtcatgcctaaggtcaaaggacgagctgatggcgctatggtcaatcaagtcgttaaatcaaaattaagttaattttaggcgggacttcctctggggagtcccgctttttttttatggtcgttaattcagattttgataattgaccataaattcgtgaattagcgcggctggctacttttaaaacggttgttgtttgtgatagaatgatggtagttttcattctaaaacaaatgaagttgaaacgtgcggttgcaacttgattcttcactttacgacgtgtagttaataatcgactaaagtcgtttattttctgggctagataatactcagaatcagttgcagtcacactctggaaggagttatctttgttggctgaaacagatgagcgtttatttcaattggcaacgccaaatttagcggccgctttaatgggcacacacgatacttttttaaaaatcatcgaggaaagcttatctgtcgaactgattgcgtttgacgagcatattaccattcgcggcgaacaaccagcagttgaccaagccgcttctgttttagaaaacttagtggcgctgttacaacatggcattaagctcaatagtagtgatgtggtgagtgcgacgaagatggcccaaaaaggcacgattgctggtttccaagaactttacacggagccaataatcatggatcgtaaagggcagcatattcgcgtgaagacattcggtcaacgtcaatacgtgaatgcgattcgtcaaaacgatgtcacgtttgggattggccccgccggaacggggaaaacattcttagccgttgtcatggccgttgcggcgttgaaacaaggattagtcgaacggatcattttaacgcgtcctgcggttgaagctggtgagagtttaggctttttaccaggtgatctaaaggaaaaggtggacccttatttacgaccgatttatgatgcattgtatgccgttttgggtaaagaacatactgaacgtttgttagagcgtggtgtcattgagattgcaccgcttgcgtatatgcgtggccgaacactagaagaagctttcgttattttggacgaagcccagaatacaacgcctgctcagatgaagatgttcttaacgcgacttgggtttaactcgaagatgattgtcaacggcgatattagccagattgacttacctaagaaaacaatgagcggcttggtgcaagctgaacatattttgcacgatattcctaagattgctttcgtacagttcagttcagaagatgtggtacggcacccagttgttgctaagattattaacgcctatgcggcgattgaaaagatgagaaagtaggaacacttgaatggatatccaaattatcgatgaaacaaaagtagttgcagaagcaaacgtaaaactggtcacggatattttagaatatgccgggcaacaattagatttacctgaagacacagaaatgtctgtcacgtttgtgacgaacgaacgcattcgccaaattaacaaggaataccgcgatactgaccgtgcgactgatgtcatcagttttgcaatcgaagaagatcctgaagaagaaggattaccagccaactttgaagaactattcgacattcccaagaatatcggtgatttgtttgtttcattagaaaaagcagctgaacaagctgaaacttatggacattcatttgaacgtgaattagggtacacaatggttcacggcttcttacacttaaatggttatgatcacattcatagtgaagatgaagcacaaatgattccattacaggagaagatcctcgatgaatttggattacaacggtaaaaaaccacaaacgggcaagaataaacatttttggcagtcactacgccacgcactcggtggattatggaccgcctttaaaactgaggctaatttacggcgtgatgcctggtttgcactcgttgcgattgctttcggtatttattgtcagttacattatttagattggttagcgattattttcgcgatttttatcgtttttatggctgaattttggaatacagttatggaacatctcgtggacttattagtcgatcaccagtaccatccagtggctaagcagattaaagatatcagtgcagccagtgtcttaatcagcacaattttagcgctattgattggcgccattgtctttggacacgccatatttaactaaaaaggggactattatgtcagaaacatatcgctcaggctttgtggccattgttggccgaccaaatgttggaaaatcaacttttatgaatcgaatgatcggtgaaaaaattgccatcatgtcatcaaaagcacaaacgactcgcaataaaattcaagggatctacacggatgacaacgcgcaaatcgtgttcgttgatacaccagggattcataaaccacataatgaattagatgaatacatggatcaagcagcgctatcgacgtttaacgaagttgatgccattttattcatgattagtgggattgataaaaaagggcctggggatcaatacatcatggaccaattgaagaacgtcaaaaaacccgtttatttggttgttaacaaaattgacgcgattcatccagacgatttattaccaatgattgaacaatatcggcatgaattagatttcaagggggtttacccaatctctgcattagaaggtaacaatgtccctgaaatgttaaaagaattggaacaaatactcccagaaggccctcaatactacccagaagatcaattaacggatcacccagaatatttcgttgttggtgaattgattcgggaaaaaattcttgaattaacgcatgaagaagtgccccattctgttgccgtggttgtggaacggatgaaagaccgcgtcaatggtaagctccagattgaagcgaatatcattgttgaacgtgatggtcaaaaacggattatcatcggtcaaaagggctccattatcaaagaaatcgggattcggtcacgtcgcgaaattgaagctttacttggcgaaaaagtcaacttgaagctctgggttaagattcaaaagaattggcgtgacaataaccaatacctccgtgaatttggttacaataaaaagagattgtaggcttaagcaatggcggaacatcgattcgaagactttaatggtctagtgatgtatcggaagaactataaagaaaaagatatgctggtcaagattttgaccgatcgctttggcaaaaagatgttttacttacgcggtgcgaataaaccgaagtttcgcttgagtgcggctattttgccatttacccaagctgagtacggtggcgacattcgcgatgatggcttatcctttttaaataatgtcaagtcggcgagtcagtttcaatcgattagcaatgacttgtttttaaatgcctatgcgacctatatcttaggcttagtcgatgttggttttccggatagcgaaccgctcggcagttggtatccgaagattgaacaggcactctcattaatcgatgaaggctttgacgcggcgatgattacgcacattatcgagattcagatgttacaagtcttcggggtgcagccacaactgcaagtctgtgcggtttgtgggcgttctgatttgccgtttgattattctgagagttatggcgggctgctttgtcaacgccactggcacttggatgttaatcgattccacggtagtcaacgggctatctattatctgcgtcttttttcagtgattgatttattcaagattcaatcggtcaacgtcaaacagacaacgcagatggagcttaagacgatgatcgaccggatttatcaagacacggttggcctatcgctcaagagtaagcaattcatcgataagatgtacagtttcgatagtcaattaccacaattaaaaaaagtgtcgtcagaaattgacagcacgccaaaagacgactaaaatagtaatcaacttaatagacgttgaagaaaagggtcccttaagacggtcagacagtgattctaggtgagtgagaactagaacaagacttgagtggattggcgtttcggagtcataccaatgaagcagcagctcgctttgagctgaagtagggtggaaccgcgagtaatcgtccctatgtgacttaacagtcgcataggctttttttatgcgcaaaatacggaaaagaggaattgaaatggttaaaaagttaaatgtgcaagaaatgattttaaccttacagcgtttttggtctgaaaaaggctgtatgctaatgcaatcttacgatacagaaaaaggggccggcacaatgagcccatacacgttcttacgggcaattggaccagaaccttggaacgccgcttacgtagaaccttcacggcgcccagcagatggtcggtatggcgaaaaccccaaccgtttattccaacatcaccaattccaagtggtcatgaaaccagccccattaaacatccaagaattttacttggatagtttacgggctctaggcatcgatcctttggaacatgacattcgcttcgtcgaagataactgggaaaacccatcaatgggttgtgccggtgttggttgggaagtttggttagacgggatggaagtgactcaatttacctacttccaacaagttggtggtttgcaatgcgatcctgtgacaagtgaaatcacatatggcgttgaacggcttgcttcatacattcaagatgtcgacaacgtgttcgaacttgaatggggcaatggcgtgttatatggcgatatttttaaagaacctgaatatgaacattcaaaatatgcttttgaagacagtaaccaagacatgcttttgaaattcttcgatgaatacgaaacagaagcaaaacgtttaattgacttaggccttgttcatccagcatatgactatgtcttgaaatgtagccacacattcaacctattggatgcccatggtgccgtttccgttacagaacgggccggttacttgtcacggattcgccggatggcgcactcaatcgcgcaagcattcgttgctgaacgtgagaaacgtggcttcccgctcttaaaacatgctcaagaatcaaacacggaggtcgttaacaatgactaaaccattcttattagaaattggcttggaagaaatgccagcccacgttgtgatgcctagcatccaacaactagaaaagcgcgtacgcgactttttagaagaacaacacttaacattcgggaccatcaaaacttacgcaacaccacgccggttagccgtcttgatcgaagacctagcggacaagcaagctgacattcacgaagaagcgaaaggccccgctaagaaaattgcgcttgatgctgaaggtaactggagtaaagcagcgcaaggttttgttcgcggccaaggtttaacgaccgacgacattacttttaaagcactaaaaggcgttgaatacgtctatgttgaaaaatcaatcatcggcaaacctgttgaaacaattttgccagaactaaaagccgtgattatggcgatgaccttcccaacgcggatgcactgggccgattacgacttcgaatatatccgtccaattcactggattgttgctttattagacgatgaaattatcgatttcagtattttaaacgttacgactggtcgcacaacacaagggcaccgtttcttaggtcaagccgtgatattggcaaaagcaactgattacgaagcaacgctggaagcacaattcgtaattgcggatgaagctaaacgccaaaacttaattcaaactcagattgaaacaatggcccaagaaaacgattggcaagtcgatttagacgcaaacttgttagaagaagtgacgaacttagttgaatggccaactgctttttatgggcaattcgatcctaagtatcttgaaattccagaagaagtgttgattacctcaatgaaggataaccaacgttacttctacgcacgcagccaagcgggtgatttattacctgttttcatcggtgttcgcaacgggaacaccgacttcatggaaaatgtcattgctgggaacgaaaaagtcctcacagcgcgtttggaagatgccgatttcttctaccatgaagatcaaaaggtaacgattgaacaaaacgttgcgaagttacaaaacgtgtcattccacgacaagattggtagtctggctgaaaagatgacccgtgttggtttaatcgcgcaattcttaggccaaaaatttggtttatcagaagcagaattagttgatttgcaacgggcaagtgatatttataaatttgacttagtgactggcatggtcggtgaatttgccgaattgcaaggggtcatgggtgaaaaatatgccttattacaaggtgaaacaccagccgctgccacagcgattcgcgaacactacatgccaattagtgctgaaggtgcactccctgcaacaaaggtcggcgcggttttagcaatcgctgataagttcgatagtatggctgatttctttgcagtgggcatgattccaagtggttcaaacgatccttatgcattgcgtcgtcaagcttatgggattatccgcatcttagaaaaccaaaactggcacttcccaatggccgattatcaagctgcgatgagtgacattgttaagcaacaagctgatttcaaccttgattggtcaaccaatgctgacgcgatcagcgatttcttaacggatcgtgttcgccaacgctttaacggcatgcggcctaaagtccggcgtgatatcgtagatgccgtcttgaagaatcaaagtcaagatccagtcgtgatgttcgaagctgccaaagtgctttcagaccatcaagatgatgcagatttcaaggcaacggttgaagccgtgacacgtgtgttacgactcgctgaaaaagttgactttgcaacaactgatttaacggttgatcctgcattattcgaaaatgaagctgaaaaagcactttacacagcggtcgaagacttacgtggtacaattgctacgaacccattagctgataattacggcatcttacaaacactacgaccattaatcgaagcttactttgatgccacaatggtcatggctgaagatgaagctgttcgtcgaaatcgcttaacacagttgatgattatcgctcaaatcgcccttaccttaggtgatttaaacgaattgattgttaaataaacaattcaaaaggggataatagcatgttacaaatgaaacgggtttatgaagcagcgacagactcagatgggtaccgaattctagtcgatcggatttggccccgcggcatttcaaaagaacgtgccgctattgagacctgggcgaaagaaattaccccaacgactgacttacgcaagtggtttggtcatgagccagctaagtttcccgtttttaaagaaaagtaccttgctgaaattgcagctaatccagcttggccggcgtttgaaaaggtagtgcacgagcaccttgagctgggcaacgtcacgttagtctatgcggcaaaggacctgcaatataatcacgttgtcatcttaatgggacttttgaaaaaggaccttgacaacgaatgagatagtttgctatatttatttgcaactgtacctaaatggtgctatgatatatagtgtatttttgtgctgataatccttaaaagtcgcatttcattgtgaggtgcggcttttacagtcttagtacaatttgaattgaatagtgaggtgagaccaatggcgggaaagattccgaatgacgtgattgatgatgttcggagccaaactaacatagtggatgttgttggtcagtatgtccagctcaagaagagcggcaataacctatttgggatttgtccgtttcacgatgagaagaccccatcattctccgttagtgaagagaaacagatttttcattgtttctcttgcggacggggtgggaatgtcttcaagttcttgatggaactggaacagattagttttccagaagctgttacaaaaatcgctgactttgtcggcttcagtttagcggagacttatcgacccactcaaaatgttcaagaatcaagtgaagtgacgcagtttaagcaactctatcgtcaggccaatgaactctttacgcatattttaatgagtactgaagcgggccaaccagcgttagattacttacacgaacggggcttgacggatcaattaattgagacgtttagtattggctatttaccggatcaaaccgatttaatgctttcattcttccagaataaagaagttccgtaccagacactacgtcaatccggcttatttattgaaactcagaccggcaagctgcatgatcgtttttccggccgagtgatgtttccgattcggaatgcgcaaggtgaagtgattgctttttctggccgggttttggtgaaacaaccagatcaacccaaatatttgaacagtcctgaaaccgtgatttttaacaagcggaaggttttgttcaactatgatttagcaaagactgctattcaccaagaacgcaaagtttacctgtttgaagggtttatggatgtgattgcagcgtattcagccggtgtttcaaacggtgtcgcttcaatggggacgagtttaacgactgagcagttgggaattttagggcaacaggctcgggaattaattgtctgttatgatggtgatcgtcccggaatcgaagcgatgaaacgcgcaattaccatgttgcagcaaaataccaagcttgaattgagtgtggtggttttgcccagtggcgctgatccggatgaatatgttcgccaatatggtgctgaacaatttaagacaaccttgcaaaatggtgctgaaacaccgattgcatttgaactgcggtatttgaagcaagggttaaatctggataacgagaaggatcaacttgattacgtgcaacaggcattgtccgtcgttgcgccaattgattcgccgcttgaaatcgagatttacctcaagcaaattgaagccgatagcggcattacccttgatacgttgaagcggcagttacaaacattgcgcgttaaacgggcaacgcaacaaccactttcaccggcatctagtcagtatgattatgacatgccacctgaaccggatgacgcatttgtgggtggaccaccgccaatcattggtgatccgcgggcaacagcgacgcgtcagccacaacggctaacccgggttgaacacgcggagcaagaagtgttgcatatgttgatggctaatgacgatatgcgcctgcaattggagaacaatgccgattttagttttgtgcataccccgtaccaactgatttacgagttatggcgcgcctttttagctgaaggtaagtcgaccttggccgacttcatgggttatatcccagatgacttacaagccttagtcgttcagattgatgcgcttgacttaccagaagaggcaagtcaagaggcgttaaacgactgtctgttcgtcattgcgcaaaataacgttgaggaacaattaagagaagcgaaaattgccttaaaagaggcgaccaaattggggaatgcgagcgaagaaacgcgcttaaccctggaggtcattagacttgtttcgcaaaagaaattaggaaattgatattaggaggtttctgaatggctgataataaaaaagctgacacgaagaaatttgatactgcggttaaggctttaattaaggaatacaaaccaaagaaagaaatcaccaatgatgaactcgttgcaaaaatcgtgaaaccatttgcgctacaagctgatgaaatcaatgaattaatgcaaaaagtggaagaccaagggattgggattgtcgatgaagatgggaatccaagtgccgctacccttaaaaaggaaaaggtttctgctaaagaattaaaagatatgactgcaccaaccgggattaagattaacgatcctgtgcggatgtacttaaaagaaattgggcgggtatctcttttaaacgcccaacaagaagttgacttagccttgagaatcgaacaaggtgatcaagaagccaagcaacgccttgccgaagctaacttgcgtttggtggtttcaatcgctaaacggtatgttggccgtggcatgcaattcttggatttaattcaagaagggaacatgggcttaatgaaggccgttgaaaaattcgatcaccgtaaagggttcaaattctcaacatatgccacatggtggattcgtcaagcgattacgcgtgcgattgccgatcaagcccggaccattcggattcctgtccacatggttgaaacgattaacaagttaatccggattcaacgacaattacttcaagatttgggccgcgaaccaacgcctgaagaaattggtgctgaaatggatatgaatacggataaggtgcgcgaaatcttgaagatcgctcaagaacctgtttcccttgaaaccccaattggtgaagaggacgattcacacttaggcgattttatcgaagatcaagatgcaaccagtcctgaagaacatgcttcttatgaattgttgaaagaacaattagaaagtgtcctagataccttaacagaccgtgaagaaaacgtcttacgtttacgtttcggccttgatgatggtcggacacggacattagaagaagtgggtaaggtgttcggcgttacgcgagaacggattcgtcaaatcgaagccaaagcattacggaaactccgccacccatcacgttcaaaacaattaaaagactttttagaataaaagagtgcgtaagcaggcggctatattttgagggttagcatagtcaggcgaataaccaacgatgttggttgtttgactgacgtagctagccgcagaaatatgcctgctagagcacgttttcgataaagtgcgtttagttacgggagcaactgagcattaatacaatattgtcattaattcagattttagaattaatggcaatgttagattaagcggaagttgttgaactaaaaagcacgtttaggcaatcaataaaaaggccgcaagctaacctagcttgcggccttttttgcgtgtatctaaacaagcagagcaccaatccccactgctaaaaatacaatccccatcaatgcacctgaccataacgccaggggcatgaagactgaagtactgtggtttgcttcaaccttcaaagtcttgaatgttttaatggtcattgaaagttggaaaacaccgatgattagcattaaaatcccaataattggtaaccagttcatgttaccacccccttcactgtaaataatttatcttatgttaactaggatttccgaaaactaataaagctcaaaaagaaggggctaattgacgtttataaccaattcaataaactagcaagactaatcccaataaagacaagccccatgaaagcactcgaacagagcgctgctggcgcaaagacagaagtattttgatctgcgtgtaattttaagtcttgataatactgatacgacttataaatttgaaaaatgcctaaaccaatcatgaaaacacagaatagttgcaaccaactcatgagaccactccttaatgtatagaaagcgttttcggtttaatttcagtataaaactaaattttgcctaaagcaacttctgctatccagaatcaagtgttcactttgaatacgtatgccgtctaaaatttggtatactaactataacaatcaaagtttctagaatggagttttatttttgtcaccaattcatttatcaaagcgtttagctgcggttgcgcagtttgtcccacaagatagcattgttgctgatatcggttcagatcatgcatatttaccaatttggcttacggaacaaaaccggttgaagggcgccattgccggtgaagtagttgccggtccgtttgaatcaacacagactcacgttaatcaatggcacttacaacaacagattcaagtccgcttaggcgatggcgtcgaggtattgaatcctgaagaagaccatgtgagttgcatcgtgattgccggcatgggtggtttattgatcacggaaattttaacccgtggattggatcatctgaacggccatgaacgactcgtgttacaacccaatatcatggaaagtactgtccgtgaatggttgaatgcacatgactatgcaatcgttgatgaagcgattgtcgctgaagacgggcatatctacgaagtgattgtcggcgaaccccaaccatcagttgcaccattaagcgaaagtgatcgagtgtttggccctgttctccgccaaacacaacctgctgatttccaattgaagtgggggacaatgttgaaaaaacggcgtcatttattgcaacaattacaaaacgcacaagtcgtacctactgataaagtcaaagcagttgaacatgaaattgcattaatcgaggagatgaagacatgggaaaattagtcgcgagtgacttaattgctgcgattgaagactacgcaccattggcattaaaagaaggcaatgaccccaccggttttcaaatcgggcgacgcgataaaagcattgaacgggtgttagtaacccttgatgtccgcccagaaaccgttcaagaagcgattgaacagaatgttgattttatttttgcccaccatccagtaatgtttcgcccagcgcggaatctcgatctaagtgatccgcaaaacaagatgtatgcggatctgttaacgcatgacatcacggtatatgccgcccatacgaatttggataagactaacggcggcatgaatgattggctagctgaagctttacaactaaacgatgtgcaaccgtttaacatcacggactaccaatcattagtaaaattggtggtctttgtccctgagtcacatgctgaacagatgcggatggcattgaatcaagctgatgcgggacatattggcgattatcaagcctgcagttttagtacgaccggaatagggcgttttcaaccaacggacgcagcaaatccttatatcggccaatcaggtgatctagaagcggttaccgaagttaaaatcgaagttgttctgccagtggccatgcaaaccaaagttgttcaggcgatgcttgcggcgcatccttatgaagaacccgtttatgatgtgattccattagctaatcaacaacaaccgattggtattgggcgcattggtcaagtcgctcaatcaatgacggtccgggattatgcgcaatttgtctgcgaaacatttgatttaacaggtctgcgcttaatttcaaatgaaccggacaaaatagttcagacagtcgccgttgtcggtggcgatgggggtaaattcttcccagccgctttacaagctggtgcggatgtctacattaccggtgatgtgtattatcatactggtcacgatatgttggcagctggtttgtcagtaattgatcctggtcatcatgtcgaaagtattgtgaaggataagatgacagaaatttttgaaaagtgggccaaacagcgtggttggtcggttacattcattaaatcacagcaaaaaactgatccgtttacatttatttttaatgcggagtaggttagaatagaattagtattaaataatatctaggaggctacaccatggctaaatatgaaaaattgattcctcgttttctagaatatgtcacaactgaaacacgttcagatgaaaacgcaacaacgagcccatcaacccaaacacaagtggtatttttacacaaattgatggccgacttgaaggaaatcggattaagtgatgtgaaatacaacgaaagtaatggctatgtaacagcgctattaccaagtaatattgataaaaaagtgccaacaatgggctttttatcacacgttgatactgccgacttcaatgccaaaggtgtcaatccacaaatcgtcgaaaactatgatggcgaatcaattattaaattagatgatgcgggtaaattcgtattagatcctaaagaattcccaaatatgaaaaattataaaggccaaactttaatcacaactgacggctcaacattattaggttcagatgataagtctggggttgctgaaatcatgacagccatggacttcttagtccaacatcctgaaatcaaacatggcgacatcaagattggttttggccccgatgaagaaatcggaactggcgctgatcactttgatgccaaagatttcgcaaccgactttgcttacacaatggatggcggtccaatcggtcaacttgaatacgaaacattcaacgctgctgccatgaaagtcgatattcaaggtaaaaacgtgcatcctagtgaagctaaaaacatcatgatcaatgcccttcaagtggctgttgatttccaaaatgctttaccaagcgatgaagtccctgaaaaaacagacggtcgtcaaggtttctatcacttattaagccttgaaggcacagttgatgaagcacacatggcttacatcattcgtgatttcgaacgtgatggtttggaacaacgcaaagcatttgctgctaaagttgctgatcaaatgaatgctaaatacggtgaaggccgcgttgttgcaacaatcaaagatcaatactacaacatggcagaagtcttaaaagatcacatggacgttgttgatcttgctaaagatgcaatggaagccgttgatatcaaaccattaatcgaacctgttcgtggtgggacagatggttctaagatttcattcatgggtattccaacccctaacatctttgctggtgctgaaaacatgcacggtcgctacgaatttgtttcaatcgaaacaatggaaaaggccgttgatacaatgcttaagatgaatgatttaaacgttgaacggaactaatcaacaatctaaaaagccccgcacaaattgaatttgtgcggggctttttttgtgcggttaattttgatgcattgtcaacaagcctttgagttgttcaatgggtaattggcctggtgcactggggtgttcaaggtaaccgaagctcacagctgaaccgaattgaccaccaaaaatgcgagaggctaagccaaattcagacatcgccatcgtgatcagtggggttgtgtgatcatgtgtaaaagactgggtaatcgccattaaccgagtagtatcctcattactttgagcggtagttgctagttttaacatatctgggtgcgtcgcatgcattgctgcgagttgtttttgaagtgttagattatcaggggttgtctttaaatcgtgatggcttagtaacacttgatagccattcgcacgtgcaagcgcgctgacggcttttctaactgcctcaggtaaagaccactcaatatcaaccacatcgccgatttgagctgataatagggctgtatagcggtctaaatagtcggttggatcagacaggccgccatcatgggttgttctgagcgttaaaataacggggtgcttgcaggcggcaatttggtgaccagccgttaataaggtcgctggtgtttgccaatagtctaagcgccattctagaatatcaatcgcagcttgcttttgctcaacgagtgccatttcacgcacacaatcgtctaggttacgcggcattaaggaaacggccgtttgtgtctggccagtgccaacatggagggtcatcaaatgacctcactttctaatcaaaatggataaacaatttttaaatcgataaggtctattttaagagaaaaagttgtttaacgcaataaacttaaccaattaaataacaaaaaagaaccaccaactggtagctcttttatagggattgattaatatgagcgacacgatattgaccatcaattaatttaaacgttcaaatttcgctgaaacgttcaatataagccgcttcacgacgttggtcattaaccgtggctgtctgccgctcatcagtgaagtaatcgcgcatttgcgctgtcactagaatatcttggcggttcggtttttcaggtaataataactcagttgaaacaatggcgatactctcaagttggttatgtttgtggtgccgttgataacggtttaagatgcgttgttgttggtgctgaaaatggggtgtcattaagtctgccacgtcgcttaagtcatttgagggccaagctgtttcaatttgatagaatgcattttcaaagcgcgccgcggtttcagcatctaacggcatggtatcagccagagcccgttttctacgtccggttaaccagtcacgcactttacgccaaatcatgatcccaagggagacaaatacgaaaagcagggtgactatactatcgaataaacgacgcatcggggacttgtagtaatgccgatatcccgcatcatcgtaataataatcacgactacggccgccaacataaccggatgtcggtgaagacccgccaccgctaccaccggatccaccagagccacccgaagatccgccagcacgcgcagcaactggacttggtaataaggtagattgtaaaattaatccgaacgctgttcggacaaaaaagatcagcttcctttaaaatggtgtttaccacaaacccatcttttaggagctgatcttttgtctagtataacctattccgaacgaattaaaatcgaaaccttttgtgaactagggctgtccaatatccaaatgggcgttcggctgaaccaatcaccgtcaacaatttcttatgaattatctcgatgtcaaccttatcaggctgaattagcacaaacagatgccgaatacaagcgatcacgatgtggtcggaaaactaagctgagcgatgagttaaagcaaaaaattctcaaccatttacgtctaagctggtcaccaggaatgattgctcacgaatttaaactagctactaaatctatttataattggttaaatcaggggagaattggtttctccttgaatgatctacctgaacatggcgtacgccaacggcgtaacgttgaccaacgatccaaatataatcaatctttggggcgatcaattgaacagcgtcccatgatgattaatcaacgtaagcgcatcggcgattttgaactagatacagtcgttggtcctcgtgggcatagtaaggcagttttattaactttaatcgatcgcaaatcacggttcctttgggcataccggttaaaagatcggacgacagcgactgttaatgaagcactaactaagttcctaaccacttttaatggtccggtgcacagctttactgtggaccgtggcactgagtttagtgggctagtatcacttgaatcacaatatggtattaagacctattactgccatgcttatacgccagctgaacgtggtagtaatgaacgctttaatcggaatttacgttatttttatcctaaagggactcgttttgagcacattagtgctcaagatttaacgacgacgttactccaaattaaccagcgaccgcttaaaatactcgactggcaaacaccgtatcaggttatgctgacaaatttgtccaaaaattcggattaaatttgcaatctaccacattgcaacaatccttaaaaattttgcaatctaatagtctcgacctactggattatttaaaagctcgtagtttagagaaccccttgtttgaggtcgggtccgtcgaagcctgtacaaaagaattcaattttgatcagctagcggctcacggaacaggtaatttatacgattatttgttggaacaagtcggttatcggtttaaagcaggtaaattacagcaacttttgcaacggctgattttggaggttgaaccaaatggctatttaaaggtggatgaagcccgttttatccaagaaaatcaaattgatcagaccacttatcaagacgttgtgacgttactacaacaacttgatccaatcggggttggtggtcgtgatgcacaagaagtgttattactacaggcctctgctatttatccggctgatgatcttagtattttggtgataactgattattttgaacaattattagctggtgagattaaacaaattcaaactcagttagccattagtcaagatgacatgcaatcgattttacacaaaataggtgcactgagtcttgaaccaggaaatatgtttgatgactcaccaactaattttcaagtgccagatgtcattattaagatgaatggctcacgatatcagctactattgactgaatttgggcgaccaacgctgatttttgaacatgcaagttacgcgcagttccaaaaagaagtcgatgtcgctaccaaacaatacattcagcaaaaatatgccgagtatcagatgttaaacacgagtttgcataagcgcgggcaaacattattaatggttgctgaagtcctaatcaaggcacagtgggattatattactggaaaacaagcatatcctaatcaattgattctacgggatatcgcaaatcaattgcagctcagtgaatcaacaattagccgaacgattaaagaaaaatcaattcggacgcctaatggtatctatcttctgcggaatttgttgaccaaacggagtacaactttagaggaaggtcccaccttgacacagacgcacattgcaattcaaacagttgttaaggaagaagaagcccatcatccattgtctgatcaaaaaatcgcggaccagttaaaagttaagtatgacattaaagttgctagaagaaccgtcgctaaatatcgtcaagaattaggtattgctaataaggcagaccgtaaataagcaaaaaagcaatggatgcagttaatattactgtatccattgctttttaggttcttataaaattgccatcagtttaaaccagtccaatacaagtgggacccactgagctgctacagtattagcatattctggtttgcctggtgcttgagtcacatgattagcaagcgaaaggccatgaacaccagctccaaagagatggtattcaacagggattttatgttgctgtaatgcaagtgtatatagaagtgaattcgttgctggaacaagggcgtctgtggctgtttgccaaataaaagctggtttagctgctgctgtgatatttttttgtgcgtgccataaagtttggtccactgtaatctgttgcttagttgcatcatcaattggaaaaccagcgtcaaaatcaatcacaggataatttaagacaatcgctgcatgatgaccacggtaatcatctaacccgtaatcagctcggtggattggatcggtcgcaatgccattataggtagcgaccacatgtccaccagctgaaaaaccagtcaaaacaattcgatccaaatcaatatcatattctccagcttgatcagtcacccactcaattgtcttagcaagctgatgtaaagcgagcggataaacggtttcagtcgaacttattaattggtaggggagaacaatcacgtgaaacccttctgctaaaaatcgcaacgcgaccggtgttgtttcacgacctgaatgatacgtaaaaccaccgcctggacaaataatcatgacgggatgtttaactggatgctcgaaatctggaatgggtgttaaccaatatgcatcaactataaatgcttgttctttaacggataacgtttgacgttcgatcgacattattaaggacctctttctattatattaaccgttttcaatctatgttaatcttaccggataatgacaaaaaataacagtattaagcatgactttttgatactaaccatttaaaaatctcattaagtaaagtatgatagttttagaggaaaatgtaatgatatcaggttatacagctctttacggcttggttgcgcatccagcgcaccatagcttgtcacccatgattcataatctgggttttaaacaacatcaaatcgacgcgcggtatctggttttcgatagccaagcacggccgcaagatgtcgcaaaagcgattcggacgcttggtgtggcaggcgttaatctttcaatgccctataaacagtcgcttgtgccattaatggacgagttaatgccaactgcgcaactcgttggcgccatcaatacggttgctttacgatcgggtaaattggtaggcacgaatactgatggcgatggtttttggcgcgctttgcagaaaagatatcccaatctagctagtcagcagattgttattctgggtggtgggggcgctgctctcgcggttatcgaagccgccgctcgctatggtgtggcgacgattcaggtcttcaaacgtcaaaatacgacttatgcggtggttgaacaacgactggcaaaaattgctaatcaccattcgatgtccatcgtgctacataattatgccgatgaacaggcactccaacaagcactcagtaatgctgattgcgtgattaacgccacgaatcttggcatggtcaatacccctggattaccgctggcagcacctttaattggtcaaataccgatgacttgtttagttgccgacttaatatatgcgccacgtcagactgcttttttacagttagcggctcgaagtggtcatccaacccaaaacgggcttggcatgttagttgaacaggccgcgttgagttttcaattctggacgggccaggtcctacaaaccgatcccatctatcatgctttaacgaaggagttttaataatttatgattattcaatttaaaccaaatactgattcagcgctgattgatgatttttgcgcacgacaacgcacgacaaatccgaatgtctatcagattaagcaccatgtagcggtgatcggtgcaaaagcaattgattttacccaagcagaggaagaagtcattgcggcaaccaccacggatgaaccgagttacgtgcttggcagtcggctattccaacccgaaaacacggtcatcgaattagcacacagtacgattggcggtgcagacttcacggtgatggcgggtccttgttcggtcgaatctgctgaccacattatggcgatggccaaagttgctaaagaaggcggtgcgactattctgcggggtggcgcgtataaaccgcggacatcaccgtattcctttcaagggatgggcgaagctggtttgaaagcattgcgcaaggctgctgatgcttatcaaatggacgttgtgaccgaagtgatggatgaaacgcatgttgatttagtggcgcaatataccgatatttttcaaatcggggcgcgcaatatgcaaaacttttcattattgaaagctgttggaaaaaccaacgttcctgttgctttaaaacgtggcttagcagcaactgttgatgatttattaaatgctgccgagtacattgctgccaacggtaatcaacaaattatgctgttagagcgcgggattcggacgtttgacaatcactatacgcgcaacacatttgatttaaatgctgtcccagttttacaaaaattaacgcactatccagtcttaattgatccgagtcatgcgactggtgaatgggatcttgtgacgccaatggctcgggctggagtcgcaactggggcaagtgggttacaagttgagattcatgatcatccagaaaaagccttttctgatggcgcacaagccttaaagccagctacttatcttgaaatgtgtcatcaagtgtgggccgttgatgcagtcgtcaaacagtggcggcactaatggtgataattgatgtccacctcacacaaaaaaattatcagattcggatccaatctggtttgtatcacatctgtgctgaacaaatcgcgcaagtttggacacctcgtcaaatcgcattaatcacagacacgaatgttgccccgttgtatttagaaacggtcgaatctcaattaatccaagttggctatcaagtcacaccgattattattccggctggtgaaacgtcgaaatcacttgaccaagcaatggcactttattcccaactggcagcggcgaattttacccgtcatgacggggtgattgctttaggtggtggggttgtcggtgatttggcggggtttatcgcgtccacctatatgcgggggattgcatttattcagatgccaacctcgcttttggcacaagttgacagtagtgtcggtggaaagactgcacttgatttaccagctggcaagaacttagttggttctttttaccagccggatttagtattgattgatcccgactttttaacgtcgctggatcaacgccaattactggccggttatgcggaaatcgttaaagtggctgcactcaacggtgggatattttggcaacaggtgacagggattcaaagtgcgcatatgattctagcgcaggctgaaacactaattcagcaaagtgtgcactacaaggcacagattgtcatggccgatgaaaaagaaagtaatcaacgccaattattaaattacggtcatacgattggccacgcggttgaaaccctggccaatggcagcctgatgcacggtgaagcggtcagcatcgggttagttgccatgcagcacttagtcgaacaaagtggactgactgaagcgcatttaacaccagtgattacaactgttttaaatgcggtcggcttgccgacagatagcccgttacttatgagtgatcgactcttcacgcaacttttacatgataagaagaatcaaggagatgccattaatcttgtttacctcgatgcaattggtgttccaaaaattcaatccataccgctaacgactttagcggctaatctattttcaaaaaaaactggtaaccaacccacagataccttacaatgaaactaacttgtaaagagtgtttaactgaccgtatgtgcggagcagtcttggaaccaacaatatatttgaaatagaaccataggggttgattgactagatgcaactgattttaatcggttttatggggtctggtaaaacgaccattgcacgcaaagttgcacatcattaccattgtgactggattgatttggatcgctacatcatgcaagaacagcaaatgacgattaacgaaatctttgccgaaaaagggcaggctgcatttcgacaaatggaatttgaggccttacagacattgatccaacacgatgggattatcgcaaccggcggcggggtcgtggatgatgctcagacgcgccatttacttgaacagagtcatatccccatttttttcctaaatgggagttatgaagcacattggcgccgcgtttcgcgcaatgatcggcggccacttgtgaatcaattgggccacgatggtttacgcgaactgtatcacaaacgacgaccaaagtattatcggcttgcggactacaccatttttttccaacataagacaccgaacatgatgttggcagaaatcgatacgcagctacccaggattcaaaaaaagttggctaataaacattagtcagcttttttcaatggtcgtagaatcatattattcgctttttaacgccatagacttgtatgatgaggttataacaaggagggtgaacaatgacatttaaattaccagcactaccttatgaatatgtggccttagagccgtatatcgattctgaaacaatgcatctgcatcatgacaaacatcataagacttatgtaacaaaactcaacgcggcgctagccaagcaccccgatttagcaggtaaatcattacatgatttgttaacacacatcgatgatttacctgagaatcttcaaacacctgtccgcaataatgctgggggccatgccaatcatagtttcttctggcgaattctaacaccgaatgcgccagaagcaccaacgggggaattactcgaacggattgaagcccgctttgggaagtttaagacgttccaagaagcattcaccgaagctgcccttggtgtatttggctctggctgggcatggcttgttatcgatcaaaatggtgaactacaaatcatgacaacgcctaatcaagattcaccacttatgagtcgtaatcgaccactacttggacttgacgtttgggaacatgcgtactacctgaaataccagaataaccggattgattacatcgaaaacttttggaagatgatcaattggccattggtagcggaattactttaataagggtgttcattataatacatttataactgaataaaataagacctatcacttaataagtggtgggtcttattttattttacacaattgtaaacactgtcatcacaattatagagcgatttattcttaaatgtaatagttgtagttatcattattgacatttttaatattaatagaataattatagaaatcattagggttttttaatagacaattttcagcagtccatgctaatctgaatatgttataaaaataataatacttttaggggatgagactatcaagaatgtaatcggaattttagcgttaggaatcctaacaactagcaccatcagttctatacaaacagttaaggctgaaccaagtgacaatcaccaaaatttagcgagtagcgtgctagcagatagcctcaaatccaaggtgaggcaccagcaaaatctaaaagcaccacaagaaatgaaaacctatattggtcgtggtgatgtttttaaagaaaaagaccggcaacgcagaacattacgctactcaagtttagagcctagcggtttatacgcccaaaaaggggatgttttgacagttgctcaggggatgcaagattcattatctatcacaattggttcgcccgaacgagaaaatcaaaaacaatatccattaacaaagggcattacaacgattaccgttgaaaacgagggcccgatttatgtgactaatcctaatgattctggtgaagcaacaatcacaatatcaggggcaacaggatcaatgccatatttcgatttaaatcaaactagcgtcgcagactttgagaaacaaatggcggaaatgacgaatgctaaagatgtgcagttggtcagtaacaaagcattaattacagttagttacgaaatggctaaaaaatatctcggtgaccctaaagaactgatgacttattatgatcggtttttaacggcacaagatcgggtttcaggcattactactgacggaaatccagtaaactttgttgatcgccatctccaacatttcttagagtcacctaagttgtatatgtatacagaaaatgaatttatgggcttccataatgatcgcgctttgcaacgactactgaagacaaatgaaggttggagcatctggcatgaaagtggtcatcagagacaacaaacaccttggaaatggggtgctgttgtagaatcaagtgttaacatttatgcattagcggctcaaaaagaattgactggtaaaataacatcgttagatcaatactacccagaaatgcatacttatctaaaatctgataataagcaattcaacgcacaaaataataatttaaagatggttatgtttggtcaattaggaaatacatttggtgataacttttaccccgttttacatcaatactatcgtgaaaacaagcttgcatttggaccagacaatgagcggatacaaaactttgttctaaatgtttctagaattacgggttataatatgcagccttatttcgaacaatggggatttgatatttccgcagcagttaaagctgaaattagtcaattagcacctttaccagaagctatttggttaaatgataaagaaactaataaacagttacccatgcgcttaatcgataccgtatcgctgaatgaccacggtattcaagttaacctgactgactaccaaaccgatgtatttaaggatgagcaattaatccttaaaaagaatggacaagtgatttccaaactcgtcaataaagagccaattgaaagtatgttaacaaataatgtttgggaaacaatcgagatgcttaaaccgactgatgtgattacaattgaacagcaaaataaaaatggtacttttaaatgatatgaacactcaattgtgctcctaccctagtatttggtacataaatttctgaacagttgtgccataattaataaaacaagataggagcattccaatgaaacgatatcaagatgattttaaagccagcattgtgaagatgcatcgtgaagagaaaagatctattcgctcgctttccgaggaatacggtgtttctccagccgcaattcataactgggttaaaggcgctaaatcagttgagctagaagacggtactgaagtaacgtccaaagaattcaaacaacttcaaaaggaaaatcagcgattaaaggaggaactcgaaattttaaaagctgcggcggtgttactgggaaagcattaggacgaattaattgccttgtcttcatagaagatcagttattgcgacaccgcttatcaattattctttcggcactgaaattaccgcgcagcacctattaccattggaaaagatatcaacctagtcaacacgaacgtgttgataatcaactcaaagaaaaaattaaattgatttgggaaaataattatcgtgcctatggttatccacgaataacgatggtgcttcgcaagtcaggcatctgtgttgggtcaaaacgaattttacgattaatgagggaaatggagattcactctttaatgaatcggcgatttaaaaaacctggcactcatgtggatcattcacaacgccccaatttaatcaagcaccagcccaatgcaaggatatggcgtgctgacattacttatttggaattacgtccaggaacctgggtttatctcagttctatttacgaaccaaaggttcatcaagttcttgctttcaagattggtcgtcagatggaggcgacgttagttgtagaaacgattaatcaggcgcttgaatatcatcaaaagccacaatattttcactctgacatgggttcacagtacaccagcaacgaagttgaaactttacttgaacggcatcagattagccactcatactcaaaacaaggttatccttatgataatgggccaattgaagcttttcactcattgttgaagagagagtttgcctttcaaacaactttttccaattttgaggacttggtaatccgaacctcaaattacatcagttggtttaattccgacagaattagaacgagtgtttagaaaaagatgtgccatttattgacataggagcattgatagtattgcacttgaagaagagttattaaactatttgaatgcatcagaaccgattggtacaattctaacccaagctaaactagatgctctccgaaatcgaattgatgctcttccttctacttttgactataaagaaagactcttagaactatttacaaaattagaagacaaatacctagctacattagtcaaagatattcaactggattcacaatcagcattagtggtatcgtttactgatgagaagtttaaagactatgcgaaaattaaggtacttgttgacgaccaaccagttgcagaggtcaaaaatggtatcagtagtggtggtcagctcgacgataatgtcttaacaattcctaaccaagcggatgcacatgttgttaccgtagtggctgaattaccgcacaagtcttacattctcaaaatgattagtcaggatattcttcttctgaaacgtcaagttgaagcgttatttgaaacaaacgatcagttgaaatctgaggtcacacaagacctattagatcaattacgaacacaaattaacgcagttaagggctcggaaaagacgatattgactcaaagaattaaccatgcacagcaactgttcttgaacactttagttgctgacatgagtgttaaaaataataaaatcgtcgttacctttgctaacgaattatttaagcattataagatagtcgtattaggaaacaacagctatctggcagaagtcaccaatggccaaaactactatggttccctaaatggaaatgtatttactccttctaaatcagttgtccatggacatccttatcgggtagaagttagatacgcaagtggaacttacaagattagagagatgattgctgagtaaataaaatggtcccacatcaaaatacgatgtgggaccatttttatctataaattactatccgttgtaaagttgagtggtgataggttcgcgctatccgtaatcagttttgcggtgaggcgttccatttcgtgttgtgcgagttgtgcagccttagcagaacctttggtcatcaacagggttcgttggtgtgcatcagtttcagcagcaaccgcttgatcagttgccacgatgttttgaaccatcaaactattgatgtgtttttgcgtttgttccaagtccttggcgaacttggcgtagtgtgcatccaccaaaataccagctaatttataggtccagtagatcgaatcttgactgtaatcctttgtccctttttggtaattgactgggacgtcatcggcaccggcatagaatgggacgtaaacactttgcgccgtgacacccattgataaccaatgaagcccgctaacatcaaccggtaagttagggcgcatttggagaatgtgtgattcttgcgtctttgctaaactaattgggcggaaagcatgtttttcttgtggtgtgccgtgaccgattggatcgtagaccgtgccttcataatgcgagcctagaattcgcgcgacatcttcgacttgaatgggcgcatcggcttgccgtaagaaggggaggttaaagtcttgaggttgttgtgcgacagatggcgttaacaatttttgaccgtaccaaacgcgcggtgtgttgtaaacaaggtcgctttggtctttggtcccaaagatatcgcggaagttaaatggcgtatcagcttgccataggtgattatcacgcacaaaatcttgaatcccgtctgaagtcatgaaccaatccggttgatcgaattgcacttcttgaatcgcgagttgattggcaaccacggcatagctatcatccggaatccgttgggcaacccagtgatgtccactgccgatttcaagataccagacctcatcgacatcggaaaagagaatcccgttactttcagtggtgccgtattcactaacgatggcgcctagccgcgcaacaccttcacgggccgttttcacgtaaggtaagacgactgtaatcatggcttcttcagcaatcccgttgtcgatgtaggggtcaaagccgagaacgcgactgttgctataagcactttcggtgccgctcatcgcaacgccgtattcgttaatgccgtcttcttcgaacagtccatattcatcggtccattcgggtgtcgccgtgtattttgcggcttcaagtggtaaatcgattgaaaaacccgtgtcttttgagacaaagtgcggggcagtcgttaacttttgatggggatggatggttaaatgtttaggccaagctgcctggctatcttcgttacgtgcgattaaagttgagccgtctgcagtggctttcttaccaactaaaacactggtacaggccgtcaattgacggtaaaggggttcactcattgtaatgcctccatagataaatcaatattagctattattatacattcttttgcttaaaaacacagtaattaccgttgctcaattgcgttaaaacaggcataatataagtattcaattaaaggaggcaccacacatgccattagtacacatcgatttaatcgctggccggagccaagcacaattaaaacaactctgtgcagacgtcacagaagcaatcactaaaaacacaggcgcacctgcagaacacgtgcacgttgtcctaaacgaaatgcaaccagaccgctactcagtaggcggcgtgctaaagagcgacgaaaaatagagtgcgacgtcagatggtcatacgctgaggattagtctaataccgtgaatgagcggcgtagccgatcgtttgcggtatgtaactaaccggaagtgtatatctgacggagcacgtttcagaatagagtgtgcaataagccgggtatcttctgaggattagcctaatcaggcagattaccgacaaaatcggtgatttgacggatgtagctaagcacagaaagttagcttgaaaagcacgtttcatccatcaaaaaaagcgattcgaccagaaattgtcgaatcgctttttcattaatccatcttaaaatattgccgtaaataattgaccacaccatcttgcgcattcgtcggtggtgtgatgtcgtctgcaatcgccttgatcggtgcaattgcgttttgcatcgcaaccccggtaccggcataggctaacatatccaaatcattactttcatcaccaaaggcaatgatatctgattgatcaatgtcgtagtgtgccgctagttttgcgaggccggttgctttgtgaatcccatgatgcacaatttctaagacgctagcaggaccaccccaagtgttgacggaaacgtcagggaattggcgcagaatttcagcacgtaacgcatcttgatcagcgcgttccacaaaaaccgtgacggccgctgggtcttgccgaagcgattcgcgggttaaaatttcatcggacttcaacgttgtggggaagaaagaaaacgtgttggcataagcttgatcagctaaaaacatcgttttaccttcggcggcaatcatttgaatcttaaagcgttcttttagttggaagagactaaagacaatgtctttattaatcgtatattgatattcaccggcccaggcttgtcccggaatgtgcattaaagccccattaaagttaaccattggcgacgttaaacctaattgttggtagaaaggttcactcaaacgatttgggcgccctgtgacaatactgacaatgtggccagcgttttgtaattcagttaaagtttgttgcgttttaagtgtaatttgggcatctgaattgagggtagtcccatctaaatccagtgcaatcaatttttgacgcatagcggcgcctccttttaaaaacgtgtttggttaaaacacgatatgtctttttattctagggggtatgcggattgttgtcaatgatcgtcagttgtaactggtcggttgaaccagtataatagagctattagagtgaccaggaggcaggacacatggcagaccaaccacaagatgatgcagcaattgaagacttaaaggaacggattctagccgcgctcgagaccgtgattgatccagaacttgggattgacattgtgaatctcggcttggtttacggtttaaacctggatgaaaatggcttatgtacgattgatatgacccttacaacgatgggctgtcccttaaccgatgttttaacggattcgattcatcaagcaatgggcaaaattccagaagtcaatgaagttaaagtcaatctcgtctggtacccagcgtgggataccagcaagatgtcccgttatgcacgcattgcactcgggattcgttaaaacgttcgatttggccttccgattgggaaggtttttctaatcgtttaagagaaacttatattagaaacggaatccattatgatacagttaagttatccagagaaattgcgccagagtcaacgtttttttgcaaccgtcccagccattcaagtacaaattcatgctgttttaactagtttattgcagattgaacaggacggcttgcccatacataatttacccgttttgggaattgatgaatctctgtatttagaaatattactccaggctgaacagggggcttttagcgccgctagtgtggctgaggttcaacgtcagttacagttaatcgaccacttactgcgcaattaccgtgaatatttgcaaaatcgcttcggcatgtgggcctatatcactacagatttgacggcggcgattgtccgcgagtttcccaattggcgttttctagaagtcatggctggtaacggctatttaagtgctggtttacggcaggcaggcgctgatgtgatttgtaccgatagtttagcctggactgccgagaatgaaacagggcgccaattagtcacgtcagtggcagctcttgacgccaaacaagcggtccaaaaatatggtccgcaagtcgatgcagtcttaatgtcctggtcacccaacggcgtcccagttgattatgaattgctgcaacaacttcgtgcaatgccaaatgcccccgttttgttgtgcttaggcgaacgttttgacgccacgaatagtcacgccttttggacggcggcccattatcacaacgacgcccgtttatcacggattaaccgttacttacgcccattcgatttaatgcgtgatcggttttactggattcaatagtctgctttaaaggagggcccactgtgcgcctgaaaaaaataatattagattgtttactagttggtttaacagttctaggcatgttaacgattagccaacgtgcaaaaactaactatagtcaacgcttaaatcacaatagtttatcagaaaatgctgtgatttttaattctaagagtcaacagtcgattcaaaaaaccattcaaaaaattgatgccgcgaaattaagccattttcaaattcaattcaacgttgattcccggttctcatatgtctatgcgaaagggaagttatcgagtgtcccattaaaagacggccggttcttctccagttacgatttcaaatcacagattccagtcgtcgttgctggtcaatcacgacttgctgaactctacaaaccagctagtcaagcgtattatcaagatcatggtcgctacttatccgtgattggcgttgtcggtacgaatcagacaactacgcttgatcagcacatttttgtatccacgtcaccagaatttgtattaaatgatcgcccactgaataaagtcaccgtattggttgatggtccgcagatgggagcgcatctgaaaacttaccaaaagattttcaaaacgactaagcacagttatttaacaccgaagacgacgccgttagtcggcgtcaactggctccgtcaaaatgcgggtgtaatcgcggtaattgccgtcctcatgatcatcgcggtcggtttcacttatttatttagccaagttatcaatggttatcacgcacaaaaagggctcagcactggtttatatcgtaaattccgcgtggcacaaacccaaatttttgcgctgcacctagttgttagctcaatcattggcttctcaattggtagttggttcttttacctaacgggtcgaacagcgatttttattggattgatgatcattgatctcatcttaatcggtatcttttattatttaattccaaaaggacgaaaaacaacacattaaaaaaacggttttgaagtgaaccccaaatattggacgaaactttaagtagctttctgggttgtaaaaattcgatattcaatcggacttttacaacccaattttgttttaattcttgaaaaattataatcatcaatccaaaccgatatttgtgaaactagcgtttcataagtatcggtttctttttggtagaaagcttcggctttcataatatggaaaaagctctccattgctgcattatctaaacatgttgctttgcgagacatactttgaaaaatgcgatgttctttcaagatatgagtccaatcttgatgctggtattgaaatccttgatctgagtggactgttgtccggtattttaaattcttagggattttcttaactgctcgattcaaaacagttgtagtaaattcaacagtagggtgtttactaacttgatggctgagaatttcacctgagaataaatcataaatacatgtgaaataggcgcgttcatcaattgtcttggttccccagcgaacttcagtaacgtctgttactagtttttgataaggacgatcagtgaagaaacgacggttgatcaagttcttagcaacggtaccaacattgcctctatatgaattatatttacgagtacgtttgttaaacgcagttgatagtaattgcagttctcgcattaagacaagtacttttttatgatttactaagatattcatacgatgtaattcaccagttacacgacgataaccgtacgctggatgattcttcttgattatttggatggtttgtttaacagattggtcagatgaaccgttcggttcatgactaataatgtattcatacgtacttttggccataccaactatttttagaatttttactagtttgtgtttaagccttagctcttggatgacttgcgcttgttgttttcttcttcctggactaaggctcttaatttttttaggtattcattctcgatttgtagcaattcattttcttctctaagacgttctaactctgtttgttgccgtttttttgattgtttatcagctgacataattgtttgccgtcctttggaacgatataaggcatcagcaccttcagtctcccaaatatgttgccattgccagatggtcccgacatttgagatattaaaatgaagtgcggttttcggataagaagccttattcgttttcatccattttaaaacattcatcttaaatgagccatcaaatgttttttcgggtgataggacatctagtccttttgggccaaaggccttataacgttgaacccacgagacaactagtgagttactcttaataccatattttctcgctattaattcataacctaaggatgacgttagataatcctgaacaacttttatttttaatgttttagaatatttggtcaatataaaaacccccgatattggattttggtccaatatcaggggttcacttcatttagtcattagattgactaaaccgtttttttttaagggttaaactttacgccgtggttcaataaaaacagcgcatgcgccactgataaatacaagactgaatagagttgtaaaccaatctcgaactgctgttaagcggtctggcacaaaagtcataaataaaatcatcgataataaacacgctgcaaacatcgttttaaaaacgcgatacataataagctgtgagcgttcatccgaacgtccaattctaattataccatagtagaaaaacagaattgaaatgatgattaatccgattgccacaccagcgattacatgggcattttgatttaaaaagtgtagtagggccatattgttacgcctcccgataagtgaatagaacgtcaattggtacatcaaaaaatcgtgcgagcttaaaggctaaaatcaaactaggtgagtagttgcctttttccattgcatagatggtttgcttggaaacaccaaccgcttgacctaatttttcttgagaaagatgttggagtactcggtattcatagactttattttcgacataattcgtttctttcaatatgcaccacttcattatcaaagtttacttatacttttaacaactatatttttacattatccaagttaatttgtcaagtgctttagcgaatatccaaatttaggcattactgcaaattacagtatccaacatcctgttgtgcaacctgattataataagttccccaagttgccattgcgttaatcacgggactcagtatttgaccaaattcagagagttggtattcagtctttaacggccggagactaatcaccgttttagtaatcacatgatccgcaattaattcttccagctgtagggctaacatgcggcgcgaacaatcgggtaaagcgcgcgtcaaatcaccaaaatggagatttgaatgttgcaaaagttgataaataatcacacttttccatttacccgagataatttgaagcgtgctttcaaccgggcagcccgcctgacaatcataaatgtgccgttcttgaaccatgaaatagcctcctttgataccgccattatagtccgctagcagtcatttgcctagtgaaaacaatgtaactagttacattcgatacacgattgttacggggcaattaatgttttagactaatggtgaataagaaagaaggcatttttaatgcaagcaattggttttaccaaacatttaccgattacaaatgaagaaagtttaatggcttttaatctccccagtcccaaaccaaaaccacacgatttatgcgtacaagtgaccgctgtttcagttaaccctgtagatgttggcgttcgaaaagggggtagaggacaatcaaaaacgccccgtattcttggctgggacgctgttgggattgtcacaggaattggcaatgccgtcacgttatttaaaccgggtgatcgtgtcttttatgttggggactttaaacgaccaggtagtaatagcgaatatcaattagtggatgaacgaatcgtcgcaaaagcaccgcagaatttaacggacgcgcaagctgccgcgatgccgctcacagcgctgacggcttgggaagctttatttgagaaattacacattgattttgaagatcgaaccactaatcatgatcaaaccatcctaatcattaatggggcaggtggggttggttcgatcgccacccaactggcacatttggccggattgcacgtgattgcgactgcctcccgtccggaaacgcaaaagtgggcgctggcccatggtgcggatcaagtcgttaaccatcatcaatcactcattgaacaggtgcacgcactcggctatcaaacggtcgattatatattagagttgaataacatcgatcaacactgggagagtatggcgcgcctgattaagcccaatggccgcatcgcttcaatcactgaaaatcatcgcccggtcgatttacaaaaattaactaaaaaacgggtcgagttcgcttgggagtgggttttctcaaagacctactatcaaacaacggatttagcgagtcaaggcattatcttaggacagattgcaaccttattggaacaaaacaaattgcaatcaaccctgacaaagtgcttaagcccaatttcagcagccaacttacggcaagcgcatcaactggtcgaaacgaaccaaatgattggcaaagtcgtagttgctaattaagcaatcaaataaagcccggtagaagaaatccttctaccgggcttttgctgcttaaaatgttatgtgccgttcattcaaataatgccgtaattcaggcgagagaataattggcgccttttggagcgcttgaatatcgcgtgcgccaagcattgccataatctcttgaatctgcgcttgccaagtgagcaagttttccgccatttgtgtcgggccttcttttaaaaccatgtgcaagaattgaccggaaatcccaacagcactggcaccaagtcgaagtgctttaacgatatctaggggattccgaatcccacctgaagcgaggatattgacgtcattttggaaagcgcgtgattcaaagagcgattcgaccgttgattggccccaatcagctaagtaatcgtaggctttatcatgacgccgttcgttttcgattgtgacaaagttggtcccgccacggccagaaacatcgatgaattgcacaccgatttgcttgagttgcgcgattgtatcagcactcatcccaaaaccaacttctttcacgataacgggcacaccaacattggcgacaatgttagcaatctcgtctaaccagtagaaatcttgatcaccttcaggcatgacaatttcttgtggcgtgttgacgtgaatttctagggcattggcttgggtcattgcaacggcttgcttagccacattcaaatcattaccagcaccaatattagcgagtacaaacccgtggggattgaattcgcgaatcacgctaaatgtatccgctagtgacggatctttaatggctaccgattgggagccagttgccattggtaggttggtaatttgggcgacttgcgctaattgtgcgttaattttctttgtctgctgactaccaccggtcatgccgttgatataaaagggactggcccggttagtcccggcaaaatcggtactgatatccacgtcggataccgcaatttcgggtaagctttgatggataaaccgaattccatcaaagtcattgatggcatcatcatggcggaatttttccgctaaaaagacatgttcatctttccgatgagattgaatggattgtttgggtctgaccatgggtaagctcctaatctacgaggtgaactgcaaggttcaatcgttcaatttgattggcccgccattgttcaaagagggcctctgtttcgatagcgcgatcaataatgacaatcccacaatcaccaccgccagcaccagatgttttggcagcaccgccgattgcctcggctaatgcgcccattttctgtaatattggcgtttcaatagcgacgtgactgaagtgagcgagatcttgtaaaatggcacgattgtggcgtaattcagcttggatctgggctaaatcattacgacgaaacccttcgaccatcgcttctaagcaagctttgctagctgcgaggaagttttgataatcggcttgccgttctgttttagcaagggcaattttatccaccaagtgcgaggttgaagcgggcgaccccgtccaaccaatcaagagtgacaactctgctggcggtgttaataattcgattgaaagactaggccatggcatttcgagcagctccgttagactaacagttggtcgaatgtcagcaagccattgtttatcaaatgaccgataagcgacccagccaccaaaaacactagcagcaatgtcgcctaaagaaccgttgccctgcacatctaaatgcgcaatagcagcaagtttatacaattggtcgtttgatagtgataattcataaaaggcgcagagagcttttaccgttgcaacggttacggcggctgaactgcctaaaccgtattttttaccatcagcagagtctaaatcactatttacccgtaggtggtagacgcgcagtgtcttacccgcttgacgtgcgtattgttccgttaagcgaatcgcggacaaaatataatggaagggattatcgcggttatcaaaaaccatttcatcaccttgtcgttgccaataaagggaattttcttggtattgtttagacacaatactcccatattcatgactctcttcaattgtgactgtcacaaattgatttaaagccacgataatagccggaaaacctgtttctactactgcgtattcgccagcaatatacagctttccgggcgctttagccgttatcaaaccatcagaacctttcacgtttaacttaaatttgcattatcgatagctcacaccaggacctggtttagcaacaaggagttgttcaggactaaaatagggcgcaagcgccgctaaaatctgaggtgtttcctgactggtacaaatcactttcacgtttggaccagcatccatagtataatagcaagaaacaccctgttggcgcaaggtctgcacgactttaattgcttgtagggtttcaggttcaaaataggtgaaaggtgggacggcactaagggttgtcgcatgcatctgcatcgcactttgttctgctaattgccccaccaaatttatatctttcttaacgattgcggccttcattgccggaattgcggcttgagcggtttcaacccatgctgggtagtagggcgacgtggccaccgtattcgccatcccagcacgactggcgatggctttttgacgatcatttaagacaatcgcaatcatctggatgtcccaatcaactgtttcttgaacgggaacagcgtatgaatccaaatcattggtcccacgttgccattccacaaaaccaccataaatcgagcgggttgcagagccagaaccacggcgggctaatctcgaaagatcccgatcgttaagttcaagcccagctgcacgactacctgcagcagctaatgccgcataaccggaagcagaagaggccaacccagcagcattggggacatgattaatggtttccacagcagcaaataaaggcagatgcgcctgttttcgaattaaatcgagaaactgactcatctgcgtactagttttggtatccgcaatggcaccattaaagctaatttggtcagcagtcaaatcagttgaaaagcggaccgttgtatctgtataaaaatgatctagcgtcattgaaagactactgttatacggaataatcaattccggattttgttttccccaatacttaatgagcgcaatattcgtatgtgctctggctgtaattgattgtcccatagtaatactcctaattttttttaaagtgcgtgtagtggttgaatccaagttttgatggcaccagctgctgataaggcttgtgccaaatcatccgcagcactttgcgtagcggccagggcgataatgcagccaccacggccaccacccgttaacttagtgcccaaactaccggtctgattagccacatcaatcaaatgatcaacacgggcattgctgacaccgagtgcccgcaaatcaagttgagcacggttgaggttcgcgccaagtaccgttaattcgttttgggcaatatttcttgcgacttgttgcgttagataacccaaatggtcaattaagggttgcgtttgttctggattggacatcatttgattctgaacgcttttgacggcggcacctgtttgccccttttgaccgctgtcggcgattacgagatacccttttaaattaatgggtaggggttgaagcggctgccctttgacaaaccataatggtgtagttgcgccggttgtcgcggcgtcaatcccgcttggattaccgtggattaaattttcggagagcgcggctagctttagcagccgttgttgactgagctcttgatgataagtcgcaaataacgctcgaatgatggcgacggccgttgcggctgaagaacccatcccgcgttcgggcggtaagtcactttcaatcgtcaattcaaacggggttaagttcggatctaatgcatgccacagttgttcaattaaccggcgaatgccttgcatctgaccaacagcctgttctagaggaccattgtaataagtactcttaatttgcggtgtctggagtgccggctcgagagttaccgttacccgcgcttgaaccgcaaagatggggagggcaatcgcaggttgtccataaacgacagcgtgttccccaattaaaataattttcgcatgactttggccaacaccagtctgcatacaatcacccttaatctctttttctgacttgaagatacccttactactatactgcaaaacaaaaatgaccgccacataaatcaaattgggcacaggttaatgggtttcctattatacccgctttttaccaacggactagccggattttatcccaatcacttgtctatctatggtaaaatgacgccaaaggagtgtgggcgccatgagcttaaaatttattattggtacagctagttatgaccaccatcaaacactagtcaagcaactacaaacagaccttaaggccaccaacacggaccgctttttttatttggtcccgaatcatatcaaatttgaatctgaagtcgcacttttaaatgacctaaaaacccctggaagtgagtatgtcgcaacctcacgcgtccaagtcttctcattaagtcgattagcttggtatttcataaaaaataccccgtactaccagattccgcggatttcaaccgcagggttaaacatccttgtctaccgcctcttgcaagaacatgcagaagaactcagcttatttggtggggaagtcaatcaaacaggctttgttgctcaattaacgagccaactattggaacttaaagtgggctgtattacacccgatgagctaactgagattgcggcccagctagcgcccgaagaagtcgaactgactactaaattgcgggaaataaccattattgccacggcgtttgaagccgctatgcaaaagcaattcatcgaaaatacgacgttaattgatgccttaactgattatttaaaaaaacaagacttacacgattgtcatttctatatcgaaggtttcgcacaattcacggctcaagaacaagcgctagtcgccgtcttaatgcagcaagcaagcttaaccgtagccttaattaccgactatgttaattaccaacaaccaccggaaaaactcagcttcttttatcaagctgagcgtacgtattatcaattataccaacaggccaagcaaaatcacattcccatcatgactgatcagattgccactaaccagcgggtttcaccaacgttactcgcgcttgatcggtactgggttgcttctgaaaaccacggtcagatcccaacagcaccagaaatcgattcgacgcaacttcaagtgatcggtgccgaaaatcggtataccgaattacggtatgttgcccgtgaaattcgtcgtttagtccaaaccggccactatcgctaccgagacttcttgattatgactcggcatttagccccttatgaaacaatgattgcgccgatttttacagaatacgaagtgccgtacttctgcgatttaccggaaacaatggcggcccatccacttgttgcgatgttggcagcgttgtttgatgtgaaagagcattactaccgctatgaagatgtaatggcgcttttgaagacggagcttttaataccagatgactatcaatcagtcgctgaattccgggctgatcttgatttgtgtgaaaatctgattttaaaaagtgggtatgaagggtatgattggttaagcgcagccgattggcaatattatcggttcggttccttccaagatggtgttcgaacaacagaagatgaagtgctcacggaacggatcaatcggattcggcattatgttcaatccgtattaccaccattttataaacggttagacagtgccaaaacagggcgcgatgccgctaaagtgctctatcaattcttaatcgaacaaggtgtcgatcgacaattgttaaattggcgggaccaagcactcgcagccaatcaaattgccttagctggccaaccggaacagacatggcaaacatttatgacgatgttggatgaatatgtgacgttattaggcgaccaacctttcgaactaaagggcttttgggatttactagcggccgggtttaatacggcgcaatatgcgcaaattccatcgacactcgaccaggtcgttttatctgaatcagggatggtgcagactaaacgccgcaaaattacctttatgattggtgcgaccgatcaagtgatgcctgatcagattgaaaccagcgccttattatccgaccatgatcggcaactattaaccgatcggttcaattcagaacaattcttaactgatccaagtgctagtcagatgagctttgaaccttatctgaactacttggcctttttaagtggtactgaaggattgtatttcacttatccattgaataatggggaaggggcgaactacacggtatccccctatgtcgaccggattaaaaactacttccatttaaccgagcaacgcgttctagcagaagtcattccgacaagtacagcgccaattacgggttcttggcgtagtttgttaagcgatttgattcaagttgcgcgacaagcacaagcgacgcaaacactaattcctgaccaatggcagactgtttatcgtttattacaacaatttcctgttagtcactacttaaccaatcaactccttcaaagtctggcgtaccataaccaacccgttgcactgacaagcgatattgtcactgggttatatggcaatgaaatccatacgtcgatctcgaaattagaagagttctatcaaaatcaatacgcttatttcttaaaatacggcttaaaactgaacgagcgcccaatttttgaactgacacctgcaaataccggtgatttctaccaccaagtcttagatcaatttatcaagatgattcaagcccaacgcttagtcttacccgatctcgataatcaacaaatcgatgcattgacggatgaaatcttacaaaaagcgtatgaacaaccagaatttaagatcctcaataaatcagcgcgaatgggctacattcgccaacaattgagtcaaacaattaaacgcgtcagccggacattgcgcgatcagagtcaacgaacgaacttaaaaccgttggcaaccgaagtcttattcggccaagttggtgcccaacaaggattagctggtctagaattcgaattacccaatcaacgtcgggttaaggtgcgggggaaaattgaccggatcgatcaactgacattaaacgaccaagcctacctgggaattgttgattacaaatccagtcaacacagctttagcttccgcgatgcatactatggtttggcattgcaaatgttgacataccttgaaactgtcttgcaagatcaagcagcaattttaccagcgcaaagcaaggtaaaaccagccggggccttttatctgcaccttcaaaacccaacaatgtcattgaagcaactgaacaaacaaaaactcgctcaactacaaaaaggcgaactcgatcaattattactggatcaatttaagtatgatggcttaattttaaacgatgagaccttactcgaaaacttggatacagctttagaaagtggctattcaccactgtttaacttcaatcgtccaaagagtggggcattcaaatcgaaacaactggtcacccttgatgagttacagcaattaattgcccataacgatcaactaatcaaagcagcgggggaagcgatttttgctggcgaaaatgctttgaatccgattatgcggcccgaccgcacgaatgcactcacaatgtcgccatataaatcgattttccaattcgatgcgatgttaccagaaaataattatcgccaattaagtgcgcttgataatcaagccgtcttagccaaaattatgaactcggaggaagaacgacatgagtgatcgccgatttacaccaacccaacaagcagccgttgatcacgcggggcatgatatcctcgtttctgcctcggcgggctccgggaagacaaccgttttagttgaacgcgtgattcaaaaaatcttgaatggcactgatgtggattcactattggtggtgacgtttaccgaagccgccgcatccgaaatgcgccaacggattcaaacggcactgcgaaaaaaagcaagcgaggcaaccgacaaagcggtgcaacaacgcttacggcagcaactcagcctagtcccgaccgcacaaatcagcacgttgcatgcgttttgcttacaagtcattaaacatttctactacgtgattaagttagatcccgcgtttcggttattaagtgatactgcggaacgtctcttattagaggatcaagtttggcaacgcgttcgcgaagaacattaccagtcaaacgacgccttattttatgatttagcgcaaaatttttcgaacgatcgcaacgatgatgggctaaccaacattgttttcgaactgtttaacttctctggtgccaatccagcgcccgatgaatggttacaatctctaaccgccccttacgaggtaccagagactggcctaacaaccagtgcttatttcaaaacaacgattctgccaaagttagaagcgaccttggcaacctgtttaaaagacttggcactcgccaacgaactaagtcaaacaaacgagaaatttgcggtatacttgccaactatcgcaacggcacaagcagcactaactgccattcaagccaacgcggccactttaagttgggcgcagtggcgcacacaattgaccgacgcccaattgggacccgccaaacgaactaagaaattagaacccgatgaacaatatgacaaggaccggatcaaaaacgccctcgataatgtcaaaggggcactaaacgatcttttaacaacctattttgtctttgacgaagcacaaaccagtcagattcaacggcgcgctggtgagttagtcggtaagttagtgacggttacccgcgattttaagcaagccttccaagctgagaagaaacgccgctatttactagattttggcgatttagaacatttctgtttggatattttggccggtgacactccggaatcagaggcagcacgaacgttctatcaaaataaattcagtgaaatcctggttgatgaatatcaagacacaaaccagttacaagaaacaatcattcaaactatcgctagtcaagcaccccgcaacgtcttcatggtgggggatgttaaacaatccatctatgcctttcgattagctgatccgagtttgttcctcggtaagtacgacgaattcgccaagccagataacgatagtgaacgcattattctcgcagaaaacttccgttcacggcgtaatatcgatgatttcgtcaacttagtctttaaacaaatcatggaccgccaattagggcagctagattacgatcacaacgctgaattgcaatatggtgcgacttattatcctgacgatcaaccaactcagccaactgaattacttttatacgaaacaaaaccgactgatgaagaatcaacgggcaagcttgataaagctgaaggtcagattgcatcagttgcacagcgaattaaacgaatgattgataatcaagaaaccatctgggatcgggatacgcaagaaatccggccaattcgctatcaagatattgtcttattgacgccaacgcgcaacaacaacctaatcattcttgattatttccaacggttcggcttaccgattgtcattagtgatgcgcagaattatttccaaacaacggaaattcaaatcatgctatctttcttgaaaattattgataatcccaatcaagatattccactggttagcgtgcttcggtcaccaattgtcggtatgaacgaaaatgaactcgcattaatccggattaatgataaaacggatgactattaccaagccgtttttaattatcttgatcagttcgaagcacaaaaatccggccaactcggccaacaagtcttcgaaaaattaacgcatttccaaaccttattaaatgagttacgagccattgcacgtcaacggccactcgttgatttaatctggacaatttaccaaaagaccggctttttagattacgccggtgggatgccaacaggtcgccaacgccaagcaaacttgcacgcactctatgaacgcgctgcgacttacgaagcaaacggctttaaagggctcttccagttcatccaatttatcgaacgtttgcaaaaacaagataaggatttagcccaaccaaccagtctcgccaatcaagatgccatctctgtgatgacgattcatgggagtaaaggcttagaattcccggtggtctttctaatggatgccaatcatcaatttaacgagcaagacttgcgccaaaattacgtgctcgatgatcaatcgggactcggaattgtttacttagacgcgaaaaaacggttaaagattccaacactaccagaattaaccatcacgacccaaaaacggcaaaagttacgcgctgaagaaatgcgaaaactctatgttgctttaacgcgtgccgagcaacggctgattatcgcgggcagttgtgataaccaagcgaaactatttgcaacttggcaaaaagggcagcaaaatcctgatctgcggttggacgcttctgttcgtcaagctagcacgaacttactagattggattggattgagcttaattcgtcatccgcaagcccgtgattggaccgaagaggggacaccattcctacctctgagcgatgacgcaactgaatttaatttaacgtttacaagtgaaacgcgccttggcgaattaccaggtgctttacaccatgatcaagattggagccagcaacaacaagtggcactcaaggcggtcgatttaacaactgatttagccaacgggattcaagaccagctaacattcagttatccagcaaaaggcgccaccgaaacgacagcttaccagtctgtttcagaagtgaaacggctctttgaagatcccgacaatgatcagttggggcaattacgctttgacgctgatacaccgcaacaaacccatcgttacgtgaccgatgaattacctcaaccacaattcatgcagactgttcgaaaagcgagtccggctgaaattggaacggcgacgcatctggtcttacaagaaatcgatttaacccaaccagtaacgatcgatcgggtgcaaagtgtcatcgaccgacttgttttacaaaaaagcctcactgccaatgttgcacaacaaattaaagttgctgctatcatgacattcttcgagagcgagttgggtcagcaactgttagctgaaccagcacaagttcatcgggaagtcccattttcactattgttaccggctgcatccttattcgccggtttacgcccagaagatcaagacaatgtcttaatccatgggattatggatggttatgtaaccacggataccgactgtattttgttcgactataagactgattttgtgaacccagctgatccagaagctgccattgaggcgattaaagcgcggtatgccggccaaattaacctatacagtgccgcgttgacgcaaattgctaaccggccggtaaccgctaaatatctctatctattgtcgattggccaactagtcgctattaactagactggtttctacgcgtcattcatagtatgattgatataataatgagtaaagtattggtgacagcatgaaccaagagataatttatgccgtcgttgatttagaaacgactggcacaaacattaaagaaggggaccgcattattcaattcggatgcgccctcattcaaaacggcaaaatcattcagacgatttcgcaagatgttaatccgcttcgcgacgtaccgactaaaattcaacatttgacgcatatcactgctgatcaactcgaattagcaccgattttcgaagatttagcgccaacgttagttgaactcttatccggtactgttttcgtggcccataatattaactttgacttaccttttttaaatggcgaattagaacgcgtggggcaaccgccacttgatttgccgggcatcgatactgttgaactggctcagatcgtattgccggaagcaccgagctatcgattacaagacctcacacagttactcgccatcgaacatgacaatcctcatcaagctgacagcgatgccttggtaacggctaaattattcttaaaattaatggcacggctgaagaccctgccattagttaccctagaacgtcttagtgcgttaggcgcgggcttgttacgtcaaacaggggatttcttcacagcgattgccgagcagatgcatgcgcaatcgagaccgctgccgaacgatctcttaattcgtgaaaacattgccctacgaaaaccagccgaggaatcatttgaaatctatccgggatctaattttgcggctgattatccagtggaagaagctgataaaaaacgattattaaaaccccacttgaaatggcgtaaagcgcaagctgccatgatggatatgattcacgataatttcgaatctgaggcacctgaaccactattaattgaagcagccaccgggttagggaagaccatcgggtatttactcccctatagttatcgcatgacgcctgaacacaaattagtggttgcaacatcgacaacgctgctacaggatcagattttaacgcaggccagaccgcttcttgaaaaattagtaggtcgccaaattaatgccgaaatcgttaagagcccgcgtcactatttggatttgcatcgctttgaattatcgctccgtttaccacataagaatcggatggtgcggttgcttcagatgaaaatcttagtttggctaacccaaacaacaacgggggatttggatgaactcaatttaacgagttaccaaacaccatttttcaataacgtgcaacaccggggattaacaagtctgcaaccacaagcgccgttttatcaagatgatttcttacgtcgcctgcataagcgccagcaacaagccgaattactcgtcaccaaccacgcctacctggcagagcacgcgaatgatcaccaaacctggggtgcgcgaccatacttggtcttagatgaagcacaaaatatgattttcaatgttcaaaaaattgcgcaacaagattggtcactttcacgttggcaactttggtctcaaaaagggttgcaatatacggatccggaacaggccaataataatttagcccggcttttcccgaaaaaatcaccgcaagcccgctcgttacggttagtgcataaaaacttaaccaagttaggccgaaccatcagtgacttagagacatacctaaccacagcgtttgaactaccgcaaccagaagcgcatcaagcgtttagtgaacgttatttgaatccagatgaagtggttcaatttgtcaccgcttgtcataatcaattcgaccaactgaaccgccaactgttgaccattcaagatcattttctcgcgttgcgttactggcttgaacagcggttagaacaatatacagagggggatttggggatttggcagtcatttgaaaacgaaatcaacctattgttggcggatgttgaagcctatcaacggtttgagcaattattcattgcgacgaaaccgcaggaacaacacgcgttaatgattcagatgacacagcctaaacaacctagtcagttaccacagtttaagctccagtggcaattgctttcagctggtccgcaaatgcaacagatcctcgcgcactttgaaccagtcaccttgactggcgcaacccttgcggttaatgggcacttcgattatttgaaacgtgaacttggttttaccgaagcgcaaccactagcgactaagaaattacgcagtccattccgcttcaagcaacaggcgcgcttttttatcgctgaagatggtcctagtcaaaagaatttagcccccaatgagtaccatcatgcagttgctgaacagctattaacgttattagttggcaatccgcatcaggcgttagtcctctttaattctaatcaggcgttagaacaagtgtattatgcgcttggccgcgccggtttatcgcttgatcgtgagattcttgcccaagggattacgggtagtgcggagaaaattaccaagcgctttatgctggggcacgattcaatcttgttggcgacaagcagtttcattgctggtgttgattttccggaatcagcactggaattagtggtgcttgttcaattaccatttgatgcgccgaatgcactgcagacacgaattcgttacgctcaactttctgcccaaggaattaatccatttaaagcagaggctttacccaaagcaacgattaaactacgccaagcatttgggcgcttaatcagaacccctaacgatcgcggcgtcttcatttgtttagatccccggttattatcgacccaatatgggcaacaaatgcgccgcgcgttaccgacaagtttgccccaaaaagcagcgtcggttaaaataatccgggaattaaccgacttgttttggttaaattcccactaagattcggttttaagcgccgatagccgttattttttgctataataaggcttattcaagcgaacaaggagagaatgcagcgtgcgcaaatataagagatggctctggatattcttattgttggtaatcattggcagcatgctgatgatttatcatcaagctcgaaaacccgaagcaacggctgaaaccaaagccgttaacattgctaaaaaatacgcgaaattaaaagagcctgatgggttctacacgtatcatcgaaatgcaacatattataccgttagtggtaaagaccgtgataatcacggcatcttcgttttaatcaacgaaaaaggcaatcatgccactgtctatcgtcaaagtggtggtatttctaaaaacgatgcgttagaaaagacatggtcaactaaaaatccgcaaaaagtactgaacattaacttcggtatgtaccgcaacaagcctgtttgggaagttgtctataaaagtgacaaaggccgtctttgttatttaaccctcgattttaaaaccgggaagacgattcaattgattgaaaatatctagggttctcaattaggggggtgtggttgtcagggttttgttatataataataactatcagttattttgaactgttgtaaattaaatgttgcacataaggagacagagtttatggttaaaaaaatcagtattatcgatgcaaaaaaccatgtcgatgaagaagttaaaattggcgtttggttaaccgacaaacgttcaagtgggaagatttcattcctccaattacgtgatggcactgcctttttccaaggggttgtcgttaaaagccaagtaagcgaagccgttttccaattggcaaaagatgtcaaacaagaatcaagtatgtgggtgacaggggtcattcatgaagatactcgttcacactttggttatgaaattgaaatttctgacatcgaattaattggtgacagcagcgaatacccaattacacctaaagaacatgggattgaattcttattagatcaccgtcacttatggttacgttcaaaacgcccatttgcgatcatgaaaatcagaaatgaaatcatccgcgcttcttatgaattctttaaccaagaaggcttcatcaagatggatccaccaatcttgacgggtagtgcccctgaagggacaactgaattattccacatcgaatatttcgacaacgatgcttatttaacacaaagtggtcagttatacgctgaagctggcgcaatggcctttggcaaagtcttcacttttggccctgttttccgtgctgaaaaatccaaaactcgtcgtcatttgactgagttctggatgattgaaccagaaatggccttcacaactcaagatgaaagtcttgaagtccaagaaaaatacgtggcttaccttgttcaaaacgtcattgatcactgtgcctatgaattaaaattattggaccgtgatgttgaccaattgaagaaatatactaaaacaccgtatccacgtatttcatacgataaggctgttgaaatgttacaagcagctgacttcgatattaaatggggcgatgattttggcgcaccagatgaaacttatttatcggatcaatttgaacaaccagtcttcattttgaattatccaaaagccatcaaacctttctatatgaagccacatccaacacgtgatgatgtttacttatgtgctgatttattggcaccagaaggttatggtgaaattatcggtggtagtgaacgtgaaactgactttgataaattagaagctgaaattaaagcaatgggcttagaccttgaagaatatcaatggtacttagacttacgtcgttacggatcagtgccacattctggtttcggattaggtctagaacgggccattacatggatctgtggtatcgatcatttacgtgaaacaattccattcccaagaatgattaacagaatcaaaccataaagagtgctgactcgaacgagttgactttgaggattaacagcaaaacgggcattatggcgcttcacagccatggtgcccgttttacagttaaccggaaaaggcagttcgaagaagcacgtttcaaatagagtgcgttgtagctggttaggttctgagcattaacgttggttggcgaataatcgatgcaatcgattatttgacaatcattgttaagcgcaggaacctagctacaaaagcacgtttgaattagagtgcgttgaaagtggttagttctcgagcatttgtctagtctagtgaatgagcgacgcaagtcgatcgtttgctggacgtagcaaagcacagaggactactttcaaaagcatgtttcaaatcagagtgctgactcaaacgagttggctttgaggattaactaaagcgccgtgaaccgaaatcaggttctcggcgcttttttatttgtctaaaattggttacaatagaactaatgaaacttttagaaaagaaggctagaatatgaacgaacttaccgcgtttttacaaggcggccaattgagtgtctctcgactgttactgcatcactatcaaacgctcaagatgtcttctgaagaattagtggtttacttacagctcagtgattttgccagtcaaaacaatgactttcccgatttagctgtgattggtgaacgcatgggaattgaacccagccaaatttacgcattgattcatcaacttttacagaaaaaactaattacccttaaatcatctgtcaatgaacaaggtaaggctgaagaccattacgatctcacaccagccttaactaaattgagcgtgctagccgttcaagacgcacaagtcactcaacaagcactagacggcaaccaacggagtgcggtctttaaccaagttgaacaagctcttggccgcccattatcgccattggaatctgagattgttgccaactggttagatttagatcattatcaaccagaattgattcaattagccgtgcgagaatccgttttaaatcaagtctattccttgaagtacgttgataagattttgctcaactggcagaaacaaaatattactgataaagaatccctacaagcttaccaaaaggcccatccaagacgttaatcgaataggagatgaagcggatgttatcaaaagccaaaacacagtgggccatgcaccaactatacaatttaattccagatgcgcagggcgcattagttgctgattcaccgtttcaattgttgattgcggtgatgcttagcgcacaagccaccgacgtttccgtcaataaggtcaccccacaactatttgctgatttcccgacaccagctagtttcgcgaatgcagagattgccgatattgaagctgatattcattcaatcgggttatatcataataaagctaaacacattaaaacatgctgccaacaactaatggcagattttggtggggaagtgccgcgcacacatgccgaattggaacaacttgctggtgttggccgtaagaccgcgaatgtcgttttaggtgacgcctttaacgtcccatcatttgccgtcgatacgcatgtcactcggattgccaaacggctcaaaatcagtgcacaggatgcctcggtgatccagattgaaaaggactttcaagcgaagcttcctaagaaaacatgggttcaagcgcaccacacactcattctttttgggcggcaagtctgtacggcacgtaagccgcattgcgatgagtgtcccttattaaggatttgccaagcaggccaacaatttcttgaagatcgtggttaaaaaacgcaaaaaaagcaccgttcagccaacgtttatcgttgaactgaacggtgcttcttttagttagttggcgctgctggtgtttgtgtcgtcgaccccgttcctggatttagttgttgccggaggggttgaggtcgaaggttgcgattgtgaactttcagttggggtgcttgaagatgaggtctccggcacactggaagattcacttggtgtttcaaccacgctacttgagctagaaatttcactgcttgagctgaccggtgcttctgagctagagtagagtacactacttgaagaagatcgactgcttgaagaacttggaatggtcgtcgtccctttaatatagagttctcgtacgccagccacgtttttagcaaccacgttacttggcattgaccaatctgagttggttgcgttttgagcgaggtaggccatcattgctttatagatataagcggcgacgttccgctcactcattgttaatccatttttaagtggttcatcgtatccagtccaaaccgtcactgaatagttcttggtataaccggcaaaccagctatccttcgctaaagttgggtttaacccagatttggcaatttcttcgctagaataatcggttgtcccagtcttaccagcttgatgaagccctggaatttgggctaacgtcccagaaccatttttaataacatcttttaacatatcagtaatcatgtaggccgttgaactcttcatagcctgtgtgccatcagaatcataattatgcgtaatcccatcggctgtttcgactttatggatataagttggtgcatagtaagttccaccgtttgcgaaggcgccatatgcggcagcttcatcaacagttgaaacattcccaccaatcccataagaaagaccagtatcagctggcacgttaatgcctaagcctttcacgaattcacgggctttagtcatgccaacagcttctaacagttcgatggctgggacgtttcgtgagttggcaagcgcattacgcgcggtaattgtaccgagataacggccatcaaagttatgcaattgaatattggttccaggataagtgtaagggacatcttgtagtttctgtgcggttgagtagtcaagatattcgatagctggaccgtaatccattaatggtttcattgatgacccattacttcggccagattgcacggcccggttataaccgagctgcacatcaccagttttacgaccaccaatcatcgcaacaattcgaccgttattaggatctgtaattgaaactgctgtttgtagttgatcatctgggaatggaatactgctatcattattgacgatatcgtataacttacgttgcgcgtccatattgatattggtgtagactttcaaaccagccgtgtacggatcatagccttttttcttcaagtcggcgaggacttccttgacgtaagcgtcggttgctttagaatccgttgaactattcgctactgtttgttgatccactaagccggtattaattgggacttgtttagcttcggcagcttcagttgctgtaatcttattgttccgcaaaagcgcatcaagaactaaatcacggcgcttcttcgctaaatcagggtggaggtacggatcgtaattacttggcgattgcggcatacccgcaatcaatgccagttgtggcaaacttaattccttcaacgacttgccataataatacttagcagccgtccccataccattgaccccgttattcaggtacactttgttcatataatactctaagatttggtcttttgaatattgacgttcgacttgaacggcaagccacgcttcttgtgcttttcgtctgaaagtctgatcgctgtttttcgttgagaatttagacagtttaatcaattgttgggttaaagtactcccaccttgtaagcccagcggtgatttaccagtaatattggcgactgcagcagacgcaattcggattggatcaatcccgaatttttctttatagaaacgacgatcttcaatagagactactgcatcttttaatgtttgcgggatttgatcactcttgacataactccgattttcgccaccaattgttttgaaaggtttcccttgatcatcgtatagaattgtcgcattcggactttgcaggtccgcttgcgttaggtttggtgtatctttaacatagtaggcaaacaaaccaatcccagccacgaaagccactacaatcagtagtaacagccattttagaattcttaaaaagaggggccggcgtttcttattagcgggttttgcttcagctttgtgccttgcaactcgcgaattattattgtttcgattatcggacattgttctttaaactcctttatttgaccgctttaataactgatctacggcatctaagtagggaataattggattaagttggtacttaatctcaatcccattgtcaatcacatcactgagtgaaatcgattttcgtgcaccatcaacttgcgcgtcccagcggctaatcagttctgttgcgggatacaagaatagccgttgtagcgggacaaatttcataatgacaaagcagatgccaccttgattcaagcaggctctgaaatgttcaatctgatgttgatggaagttccgaaacggaaacgcggttttattcttcgtttccttcgcttcaaaatcgacgtaacggccctgataaatcccattatagtcagttgttgaggcttgtttaaaataagcttctttaataaccgcttggctgcgggcagggtagtcgaccttcacaatctgaattggcgttggtttcttatacacgacagccgttgcatgtaatcgataatactgattactatcattgagttcttcttccaacgtcatgccgcgtttaccaaataacgttgttgcttctggttgccgggcttgctttttagttggttttgtctcattatttgtataaggctgtccgttaggataatgaaaggccattgaaaatcacactcctgtttcactattatagcaatgtttagtttaattgaaaatcatttgggagggacctgacttgaaacgactatgggtgagcggctatcgaagctatgaactcggtgtttttggcgaaactgacgagaaacttaaagtaattaaatattcattaaaaaagcagttaacacaatatttagatgatgggctcgagtgggtgatcactggtggccaaatggggattgaacagtggagtctgcaagttgctattgaactaaaaacggactatccggatttaaaattggcgatgatgttgccgtttaatgattttggtcagcaatggaacgaaaataaccaagctcaattgagtcagctcaaagcgcgagtcgatttttgcgaaccagtgattaacgcaccgtattctggaccgcaacaattgcgccagtatcaacaattcatgctgacccatacggatggtcaactattatactatgatcgtgaatcaccgggcaaaccagaatatgattatcatgcagcccgccaatatcaagaccaacaagattatccgattaacttggtcgattttttcgaactacaagatatcgcgactgagttagcggaattagatcagcaagagttttaattatccgataactttgctataatgggaatcatagtacatttattctaaatgaggtgtcaaaatggacaatcaaattgaaatcgaattgaacccaactgatatattgaaaaaagaatttaaaacaaaaatgcggggctatgaacctgaagaagtcgatggttaccttgatttagttattaaagactatcaaacttatcaagaagcaatcgatcggctaacggcggaaaatgcccgcttattcaagaaggttgacgaattaaaccgccaactcagcgcttctgataacgtgaaggaaagtgcaccacaacaagcttcagcagcaaccaactatgatattttgaaacgcttatcaaaccttgaacgccacgtgttcggtgctaagttaagtgaacaaaatcaagctccacagacaagagttcaaaatcattcacaatttgacgagacaaatctttaatcttgtgctatacttataaacattgattcaacatttgtaaatcttgagtaatcgcggtctacatcggtaggctgaggaaggtccatgcccgcacaggctgagatgcttgtagtgttcgtgcctggcccaataagccagggtaccttaacggtaacggcggaaaaagcgctaaaacttcggtcatgcgtgaatatccttaaatagtgccacagtgacggagcgtccttggaaacttggacggtggaacgaggtaaaccccgcgagcgagtaacccaaactttggtaggggcgtctcatttatggaaatgaactaaaaatgagagttcgtaagaacagatagatgattactgaaggaactttcttcctggggaagttctggaacaaaacatggcctataaaggtttacaatcaggtggcttgggcttttgcccaagctctttttatttaaaaaataatttcctaaggggatctttaaaaacatgacttaccaactatacgcaacaatggcgagtgggattgaatccattacggccaaagaattacaaaatctcggttatgaaacacgttcagataatggccgggtgtatttcgaaggcgatgtggcagatattgcaaaaaccaatctctggttacgcagtgctgatcgggtgaaaatcgcgattggtcaatttgaggccaaaaccttcgatgacctttttgaacaagtgaaagctttgccatgggacaagttcctgccattagacgccgcttttccagttgctggtcgctcagtccgttcaacgctccatagcgaaccagacgtgcaagccatcactaaaaaagcgattgttgataagttaagtactgtctatcaccgccgaacacgtttagctgaaacaggcgcaacgtatccgcttgaagtcagcatcctaaaagatgtcgtgacgatcagcttagatacaactggtcctagtttattcaagcggggctaccgccttgaaaaaggggaagccccattgaaggaaaacttcgcggcatccttaattcttttaagccgttggcaacctgatatgccatttgttgatccaacgactggttctgggaccattgcgatcgaagcagctttaattggtcacaacattgcacctggtatgcatcgtaagtttgcctttgaagacttcgattggatcgatgcttctgttttagaaaatgccaaagccgaagcgaaagcagccgaaaaagaccaaccacttgaaatttttggttatgatatcgatcaaaacatgattgatatcgctaagttgaatgcgaacgaagctggtgttttacatgatatccagttcaaacaactcgctgttaaagatttcaagacagatttaaccaacggggtcatcatcgccaaccctccttacgggaaacgattaagcgaccaaacacaagcccgtgctttgtataaagaaatgggtgatacctatcggtcattgaagacttggagtaagtatattttaacaagtgacttacaattccaagaatcattcgggcaacgcgcaactaaacgccggaaattgtataatggtcggattcaaactgatttattccaatactggggtcgtccagtatggccacgtgcagaaaaagaataaaattttttataaagcattgccgttttcagtcggtaatgcttttttatttgctgaaaatcccttataataaagattacttcaataataaggtgagggatcaacttgacagtcattttagcagcagaaacaattcctgaacaacacgtcaaagcactaactgcaaaaggtttaacaatcatcgctttagctgatttaaaaccaagtcaactgggtagtattgagattatgtttggttggaataaagatgtaggcccgaaaattttagcagagcccggtaatcaattaaaatggattcagaccgcaagctcaggggttgattatttaccactagccacgttagctaagcaaggggtactggtatcaaacgcacgcgggatgcacgcaaaaccaatcgcacagacggcattaagttacatattacactttacccgtgggatttatcagagcttacccgcacaagcagcgcatcaatgggagcatcatgctattggtgaacaaatgacaaatttggaacaccgcacactcctcatttttggaacaggtcaaattggtgaggaaattgcaaagtatgcccacgtcatgggtatgcacacaatcggcgttaatcggcacgagaaacccgttgccaattttgatcagattctaaccgacacggattacgaacaagcattgccacaagcagacttcgtgattaatgtgatgccattaacaccggtcaccaatcggttcttcgacaccaccttttttacgcaactccatcgaggggcttacttcttcaatttagggcgcggcgcttcagtcgacgaagcagctttgatgcactatctacaatccggtcatttggcaggagcagcaatcgatgttgcccaaaacgaaccattaccaagtgattcaccattatgggccacaccaaacctgattatcacgccacatatttcaggttacatcgctgatatccatgaacggctcttcaaaattttcgatcaaaatttacccagttatttagacaaaggtgaattacccgtcaatccggtagacttgtcagccggctattaaaaaaacagcgtttgaagtgaaccccaaatattggacgaaactttaagtagctttctgggttgtaaaaattcgatattcaatcggacttttacaacccaattttgttttaattctggcaaattacaagtttaatccgaacaagcccggaatctttcaatggcagtctgttgatgatgtatttttaatggtcgttgattaattagttcaagtgctgctaggatctcatcagtcgttacttggctaaaattggtctttttcgggaagaaccagcgtaaccgtctattaaaatattcattggaacctcgctcccatggtgaatatggatggcaaaaataaactttgatctgataatcctgttctaaggcctgataattggcaaactctttaccatgatcaacagtaatggattttacttggggaccgaaggcccccataaacttgccaaaggcggtgtttagagccttagccgttctattaggggctttgatggcccatagaagtcgggtcttacgttctacgaatgtaaccagacatgatcgtgactcacttcgactagaaagcaccgtatctacttcccaatgaccaaaagctaaccgttgattaacagttgttggccgttgttcgatggaagtcccacttgtaaatttcccacgattttcgctcactcggtgctggcggacattccgattgggtagatcagtcaatttgaaggggagccagccacgattaagccaattataaattgacgcagtgctcaagttataagcggccgcaatggtttctggtgaccaggttaatcgtaagtgattggtaattaaagtcgctaatgctgccgtcagcatcgaacgacgaccgcaattccgccttttgcgatccgcatcttgctgagctaattctggatcataaggtttaactcggtccaactcatagctaatcgtagctttggcgacgcctaaggcgtcagccattacttggtaagatttattcccctcattgaccagttgtgctagtgcgccacgttgaaaacgtgataaagtagatgtacccaaagtaatcactccctatattggttggaattagctactaccattgtaagtgattgctttgggctttttaatttctgttcggattaattatagaatttgccttcttgaaaaattataatcatcaatccaaaccgatatttgtgaaactagcgtttcataagtatcggtttctttttggtagaaagcttcggctttcataatatggaaaaagctctccattgctgcattatctaaacatgttgctttgcgagacatactttgaaaaatgcgatgttctttcaagatatgagtccaatcttgatgctggtattgaaatccttgatctgagtggactgttgtccggtattttaaattcttagggattttcttaactgctcgattcaaaacggttgtagtaaattcaacagtagagtgtttactaacttgatggctgagaatttcacctgagaataaatcataaatacatgtgaaataggcgcgttcatcaattgtcttggttccctagcgaacttcagtaacgtctgttactagtttttgataaggacgatcagtgaagaaacgacggttgatcaagttcttagcaacggtaccaacattgcctctatatgaattatatttacgagtacatttgttaaatgcagttgatagtaattgcagttctcgcattaagacaagtacttttttatgatttactaagatattcatacgatgtaattcaccagttacacgacgataaccgtacgctggatgattcttcttgattatttggatggtttgtttaccagattggtcagatgaaccgttcggttcatgactaataatgtattcatacgtacttttggccataccaactatttttagaatttttactagtttggtagattgcaaatttaatccgaatttttggacaaatttgtcagcataacctgatacggtgtttgccagtcgagtattttaagcggtcgctggttaatttggagtaacgtcgtcgttaaatcttgagcactaatgtgctcaaaacgagtccctttaggataaaaataacgtaaattccgattaaagcgttcattactaccacgttcagctggagtataagcatggcagtaataggtcttaataccatattgtgattcaagtgatactagcccactaaactcagtgccacggtccacagtaaagctgtgcaccggaccattaaaagtggttaggaacttagttagtgcttcattaacagtcgctgtcgtccgatcttttaaccggtatgcccaaaggaaccgtgatttgcgatcgattaaagttaataaaactgccttactatgcccacgaggaccaacgactgtatctagttcaaaatcgccgatgcgcttacgttgattaatcatcatgggacgctgttcaattgatcgccccaaagattgattatatttggatcgttggtcaacgttacgccgttggcgtacgccatgttcaggtagatcattcaaggagaaaccaattctcccctgatttagccaattataaatagatttagtagctagtttaaattcgtgagcaatcattcctggtgaccagcttagacgtaaatggttgagaattttttgctttaactcatcgctcagcttagttttccgaccacatcgtgatcgcttgtattcggcatctgtttgtgctaattcagcctgataaggttgacatcgagataattcataagaaattgttgacggtgatcggttcagccgaacgcccatttggatattggacagccctagttcacaaaaggtttcgattttaattcgttcggaataggttatactagacaaaagatcagctcctaaaagatgggtttgtggtaaacaccattttaaaggaagctgatcttttttgtccgaacagcgttcggattaattttacaatctaccgtttgtgtttaagccttagctcttggatgacttgcgcttgttgttttcttcttcctggactaaggctcttaatttttttaggtattcattctcgatttgtagtaattcattttcttctctaagacgttctaactctgtttgttgccgtttttttgattgtttatcagctgacataattgtttgccgtcctttggaacgatataaggcatcagcaccctcagtctcccaaatatgttgccattgccagatggtcccgacgtttgagatattaaaatgaagtgcggttttcggataagaagccttattcgttttcatccattttaaaacattcatcttaaatgagccatcaaatgtttttttgggtgataggacatccagtctttttgggccaaaggccttataacgttgaacccacgagacaactagtgagttactcttaataccatattttctcgctattaatttataacctaagggtgacgttagataatcctgaacaacttttatttttaatgttttagaatatttggtcaatataaaaacccccgatattggattttggtccaatatcgggggttcacttcattaggactttttcgcgcattttagaatcaagttagccactgtctcaaaattttttggacaataaaaaacatcaagaacagatatcctgtatcattgaagttcctacacaaacaatggaagaggatattgtcttgatgcagaaacaggataccacacaccgccaaaaaggtcagcacttaacatcactcgagcgcggaaaagtggccggattccgccaagctgggaagtccaatcgttggattgctgctgaaattggcgtctgcccgcagaccattaataatgaaatcaagcgaggtacagtagatcaggtcaagaagagtaatggcaagcgcgtctaccatcgacaatacctgccagaggctactcaggcacgttacgagactgcacgcttgagctgccatcgtcctgacaagttcgccagcgtacaggtcttcttagcctggtacgtacagcgagctaagcaggacaaatggtcgccggatgcttcaatcggctatgccaagcgacacaagctgtttactcctgaagagcttgtttgtgcctcgactttgtaccagtacattgacgaccaacgcctagagattcgaaatatcgacctgttggagaagactaagcggaagacctctcaccagcaccacaccaaggctaagcgcctggctggccgcagtatcgaggaacggcctaaggtcgttgaacgacgcaggcagttcggtcactgggagatggataccattgtcggtaaacgcaatggcaaggagagcgtcatcttgactctgattgagcgcaagacccgttgccaacttctccgcttgatcgaaggacgagatgcagactctgtgagctatgcattgcgtggaatcaagcgcgaatggggagcttgcatcaagaccatcacagccgacaacggacccgagttcaccgccttaaatactgcttttgctgggacggaaactgagatcttctacgcccatccttacacgtcctgcgaccgtggcaccaacgaggcacataaccggatgatccgccaggacttccctaagggcatgtccctagatgacattagccctagtcaagtgcaggccacgcaagaccgcttgaatcagttgcctcgcaaacaacagggctactgcacaccccagcaaaactttgaggccgaagctcggcgcgttcgccgcatggcccagtagtctctctagcgccacaacttctatttgataacggcctgttctgggattgtcctcaacgactggctaacttgttcttgcaatttacgattaggactttttgtcttaacgctgttttttttgtgactttaaggggcctttttgaattcgcattttaagcaagtttcgcgaccacttgtccactcactaatctgaaacgtccttaaaatgcgcctctggtgattgatcgtttataaacgtgattagaccgcgatttagccatcaatagcctttaatgtgtttgagcgcattcttttggtagaaagaatgcgctcggaatccctttaaatcaacgataatcaaaggtgcaaaataccaccgcatggtttataatgatatagagaaaaagaatgcggtcaaaaaggcggaaaaaacatgcggaaatcgcgcactaaaaaaggcaaaaaattaaatgttcaacctttacggacaaaagatgagattgaagacatgaaagtcatcttgcgccattcacaaatgggtagtcgcaattatttattatttttactcggcattaatactggcttgcgctgttctgatattgtgcagttaaaagtcaaagatgtgatcgaagacaatcccgtgattgttgaacaaaaaacgggtaagtggcgccaaattagtttggcgagtttacgcccatacatcagtccctatattcaaaataatgaattgctaggcaatgattggttgtttcctagccgcgtcggcgataaccacatcaccgtcaacggtgtttaccgcatgttgactgaagcaggtaagaaacttgggcgtaatgatattggcacccatacgatgcgcaaaacttacggctactggttctacaaacaattcggggacgtgcggtcattgatgattgattttggtcattcaacgcaagaaacgacgctccattatattgggattacccaagacgaagtgttaagcaagaaacaacaactggcgattggactttaaaaaaagcttgcattaaagtgaggtctaaggtgtatagtaaagacaatataataggaagagataggagattatagttatgaaaacagctacttttatgggtcctggtcaaatgaccattaccgaagcaccaaaaccaacgattgaaaaaccaaccgatgcggtcgtgcgcattatccgcgcgtgcgtctgtggttctgatttatggtggtatcgtgggatttcaaaacgagaagtaggcggtttcaccggtcacgaagcaattggcatcgttgatgctgttgggactgacgtacaaaatgttagtgtcggtgattttgtgatcgtgccatttacccatggttgtggccactgtgccgcttgtttaaacggttttgatggcgattgtaccaaccgcgagaataatcctggtggctaccaagccgaatatctccgttatcacaatgcaaactggggcctcgttaaagttcctggccaaccaagcgattaccctgatgaaatgctgaataatctattgacgctttcagacgtcatggcaaccggctatcacgctgccgtgtccgctgaagtgaaacccggtgacacagtcgttgtcatgggtgatggcgccgttggtttatgtggtgtgattggcgccaaattactcggtgcgaaacggattatcgcgatgagtcgtcatgcggaccggcaaaaattagcccttgaattcggcgcaacagacattgttgctgaacgcggtgacgaaggggtcgcaaaagtgatggcgttaaccgacaacgctggggccaacgccgtcttagaatgtgtcgggaccgaacaatccgtcgccactgccgtcgccgttgctggcgcaggggctgtcattggtcgtgtcggcattccccaaaaagcagagatgaacaccaatgccttattccggaagaacatcggtttgcgtgggggaattgctgccgtaacgactcatgatcgcgctcgtttattggatgctgttttaaagggtaccattaatcctggtaaagtctttacacaacgctttaccttagatgatattcaagccgcttatgaagcaatggatcaacgcaaagcgattaaatcattattaatcatcgctgaataatataaaaagtgccgcagaacaggaaaaatcctgattctgtggcacttttttaatgcgcaataagacttaatagataaccgccaagacagccgaagatcagactgagcaaactcccaatgaggtaatattcggcgaagtggtgttcgttggattcaatggctttaaagcgggtcagcgccttaatcgccacaatcacagcaatactcgcaacattgtgcgtgtaaaacaagattaagatggcaaaccgttctaaatgaccaatatgccgacccagttttgcaccatctggcaggcgatccatgtttaaatccagtccttttaaatagaagctaatgaaataatcggcaaataataacgtgctcaaaacaatactggcagccaataacaatcggttcacatggttaaacgcccattgctggccgaggaacatgctcacaagaccgatcactattaaatggagtgcttgatcgatggtataactcatcactggtacgcgattgctggttaaatgtagctgtgcttttaaaagtggctggctattttgtttaaatagatcaatgagccaatgactcatcacaatgatgactaagccgattagtaacggttgccaatgtggccaagtaggtggtgccattaaccaaccgccaccccataaaataagcactaacgggacttgtgtcagtgcgtgcttgcataatggccaccatttcacaccgagtttcgttgatcgtttgcattgagccatctgatcagattgaaagacaaagtcgcagccaatatgactaagcaagaaaagcgcaaagaggttcattcgactgcctccttaaaggtcatcagttgcgcgcgcaacgttgccagggtctgttcaatcaagggatactgaatctgattcagtaagcgactgactttactagaggctaatgcacgccctttttgatcactgtagtctagttcataggaagcaacgccgtatttggtccacaacaattccgctaattcatagcgtttcaatgttggttgaagcacgatttcagcaaaagcgtccttgcgcaactgcgtattcaagagttgctcataaattaaataaaagagggcattaatcccatttgcggctggttgatctgccactaattgaaattgaaaggccgtcgtcataaagggataaccttgtgctaattcagcaccttgacgcaacagtttggcttgatctgctgcggcgagggcgttcacaattgctgtcccgttgacccgattgatatcctgatagtcacttggactcggcgtagtcatcgttcctaagccaaccccaaaataaaaagtgggctccgccagccccgcaaaatgtgtctgccagaaagtttgaaaagcgtcactctttaaataggcattacaaaagggatagacatcaacaatctgtgcctggtcatccgctgaaaaaccgcccaatagaccatcaccatccttaattgcaaatggtgttaataacgctggaaaatggtgattcaacgtgtcggcgaagtgttgcaataactggagtgtctgtgcttgttccgtaaaacgggtgcggctatccgctaaatcaatgaaacaataggctgtctgcatcgttctcatcctctctgaaaacatttgattataagtacataataggtgaatatgaacgaataatcaaatgtttttgaggagcggtttacatttcgcagcctacgtattatagttaactacataagcaactaaccaattaacgaaacggaggtgttccggatgctttttgaatttaataatgatacaccactctaccggcagattgccgaacaaattgaagagggtatttttactggggtctttccacctggtagtcaagtcccatcgacaactgaaatttccagacaattcaatatcaatccagccactgtactcaaagggatgaatcaactcgttaccagcggcttaatcgaaaagaaaaggggactcggcatgttcgtcacatcaagcgcacccgcacagatcactgaaaaacggcaatctgaattttttgaacactatgttgcccaatttatcactgaagcacaacaattaaatctaaccaaagacgacctaattgcactgattgaaaggggttatgaccatgcctaatttacaaaccacacaactgattaaacaatttgggaaacaggtcgtcctcgacgacatcaacttaacacttaaacccaatacaatttacggcttactcggccgcaatggggtgggtaagagtaccttattaagtattctagccaatcatcaaactgcatccctaggtgagattaaatggggcgatacggtcttaaccggtcgcgatcatccgttacaaacgatttacttgatgtcggaaatcaatctctttaataaagatgacaaattgcggaccattattaaaaataccgccttactgcaaggttcatttgatcatgcactcgccaaagaaatgctgactgcatttgatttgaatccaaaaaagaaactcaatcagctttcaactgggtaccgcacgatttttaaaacaattgttgcgctttgtgtgccggcggaatatgttttcctcgatgaaccagtcttaggcttagatgctaactaccgcagcctcttataccgctacattttacaggcctatgaaagtcggccacggacatttgtcgttgcgacccatatcatcgaagaaatcgcgaccttagtcgaacacgtcttggtcttgaacgacgctcaattaattgtcgatgatgatttggaaaccgtcctcgccaagagttaccgtgtcagtggcccggaagaacttgttcgcgagtactgtaccgacttaaacgtcttagattcccagcaaatggggaccttatacacggtttatctttatgacgtcttaccagaagaacgggttattccagatcgtctaacgattgaccatatcgatctacaagaaactttcattaaattaacgaacaaaggaagtgaagcacatgtttaatgcaatgatgcggtaccgcctagcagcgatttggcgcagcttattaatggcaattgccgtcttcgtcatcatcacaggcggttccattttaatcttctccaaccaaatgacctggaaggccttttggttcacgctcttgagcggttccttagtcgtcagccaactcgttctgattttcctttcgtttgcgacaacccgcaagccgtttaattttgggattctaaatggcattccgcgcagtattagttataccacccaagtgattagcctcttcagcagtcaattgattagtttcctagcactctacggcggcacatacttcattgctgcccaccaaagtgggattaatcgcttctttcttgatagccgtttcgtcctgctggccattgtactcatctggaccatcatggcagaagggattgccattagcagtttcattacgttatttgaacgtaaagcttggcttttcttatttgctgcatggctaattctgtcgacactctatcaacactacattgaaccagcgattgaacgcatgttaccaagctgggtggatacttttgtcctgaacattcctggtgatcaaccaatgaaccaactcgcaaatctattccaccaaccgattttctggattagtggggtaataggcatcctcatcccattagttattgctggtatttgtcaacacttcatgcaaaccagacgcatggcgattcgttttaaacgatttgcacgttaacctaaaagagctactaccaagattattttggtagtagctctttttagctagttactattgtgctaataattcaactaattctgtttttggaatccctgtgaagtaggacgtggtgtcgattggttcgagagtgcttgctaaatgttcacggtcataaaccgtgccgactaacttttcagccaattcgttggcatcgccggaaccgaagaagtcgccgtagaacttgacgttggcaatcttcccattttcgattaacaagcgcgcatcaatcgtcccgaaatcgaagtgtttgcgtttttgaatcgttgatttaggtgatttgccatagacccagtcccaattgctatagagatcgttaaaaatcttatcgatggcttgttcgtctgcggccgttaattgatattcgcggtcggcaatatcagctagttgatcggcgtgcatcaagttcagtaataagacgtctctgaactcttctgtcgacatgttttggtattcagggtcaacgtgcccttttaggtttgtgacgcgttgtcgaatcgatttaatgccttttgacacaatcttatctgcagggacattcaaggcttgggtcaaaacatctaaatcaacatcccatgaaagggtgccgtgggagaaggttttaccattcttggtgtacatcgcgttccctgagaattttttaccgtccactaacatatcattgcgaccagaaacttcagccgttgtggcgcccatttgatggagtgcatcgacgattggttgcgtgaaggatttgaaatcaccgaattgttcagaatctgcgttcaccacgaaactgaaacaaaggttaccgagatcttgataaatcccaccgccaccagacaaccggcgtgtgactgtaatatcatggtcttccacgtatttttgattgatttcttcatacgtattttggttgcggcccacgataatgcatggtttctcaatgtagaatagtaagagtggttcatcgaaatttttttgattcattaaatattgttcggttgccaagtttcggcgaatatcatttgacttcatcacaacgtaatacatcagcataaaacccctttcataatcactacggatttattatactacatatcgcatcaaccagtgtactgaagcattaaaaaagcggtccccgataaaagggggccgcaggattaatcatcgctatattctaaaatatcaccaggttggcagtctaatacgcgacataacttctcgagcgtcgaaaagcgaattgctttggctttaccggtttttaaattcgaaaggttcgcaatcgtaatatcgacctgttcagcaagcgccgtgacactcattttccgttgagcgagaattacgtctaaattcacacgaatggccattgaattcctccttagaccgttaaatcgacttcagattgaaaggcgattgcacttttaaaaagatcttcaacaatctgcatcaaaatgaggattgcaaacggaatgaagaccaggcctaaccccagcaacatcaagcctggtgcatcttcgagttgcgtaatccggtagaaaaagggtagggcaaaaagggccgtcaaactcgcaaccaaaatcgcttttctaattgctgatacatatcgtagcgtctgagggagaaaaacttgatggtgctcaattaagcggagaatctgcgccaacttgattaatgcaaaccaaatactagccgtcacaccatacgcagcaatcgccaacatccagattgtcgctgggtattctaagtgtttcgtggtcacaatttggatcgtcactaacaaacttaacagaccaaataccgccgcaattccgagtaatgccattctaagtagccatttttttaacattcatctgatacctcgtttttaagaatagttttattataatcgttttttattgaaaaacaattaatttttatcgtttttcgataaaacttaatatttaagactagtcaaagtaggcgtaactgttataattatagggggtaaactaaactgtgaaggactgatcttatgaaaatcaggcatctctggctaacattgacgctgaccgttgcattattgggactaacagcctgtcagaaccatcctgcaaaaacaacgacgcctcagcatagttcgcagaaaaaaacggtgcgtccacaaaaccaacagacttacgacaaaaaagatgtccaagcctattggctgtcttaccggcataaaacctttttcgtcattgcgcatcaaccgaatgaacaactgaatacgaaaaataagctcaaaacgtttttgagtcaaacaactacgcaaacactagcgcacgattcctatcaaaaactggacgaagacggcttcatttttattgccgataatcagtttaaaccacaccaagactttggctatgggatggtcacagtgggcattccacgcgacttcacactacaagccattgttgccacagccaatctaaacgacccgctctacaatcgctatccaatttatcaaattcaatgatcagggagaaaacaatcactatgaaaaaaataatgccagtggctcctatgatggaattacggacaaactgttcgatataatacatcataaaggagctttttattatggcaattaaatattcaaatgaatttggtagattgcaaatttaatccgaatttttggacaaatttgtcagcataacctgatacggtgtttgccagtcgagtattttaagcggtcgctggttaatttggagtaacgtcgtcgttaaatcttgagcactaatgtgctcaaaacgagtccctttaggataaaaataacgtaaattccgattaaagcgttcattactaccacgttcagctggcgtataagcatggcagtaataggtcttaataccatattgtgattcaagtgatactagcccactaaactcagtgccacggtccacagtaaagctgtgcaccggaccattaaaagtggttaggaacttagttagtgcttcattaacagtcgctgtcgtccgatcttttaaccggtatgcccaaaggaaccgtgatttgcgatcgattaaagttaataaaactgccttactatgcccacgaggaccaacgactgtatctagttcaaaatcgccgatgcgcttacgttgattaatcatcatgggacgctgttcaattgatcgccccaaagattgattatatttggatcgttggtcaacgttacgccgttggcgtacgccatgttcaggtagatcattcaaggagaaaccaattctcccctgatttagccaattataaatagatttagtagctagtttaaattcgtgagcaatcattcctggtgaccagcttagacgtaaatggttgagaattttttgctttaactcatcgctcagcttagttttccgaccacatcgtgatcgcttgtattcggcatctgtttgtgctaattcagcctgataaggttgacatcgagataattcataagaaattgttgacggtgatcggttcagccgaacgcccatttggatattggacagccctagttcacaaaaggtttcgattttaattcgttcggaataggttatactagacaaaagatcagctcctaaaagatgggtttgtggtaaacaccattttaaaggaagctgatcttttttgtccgaacagcgttcggattaattttacaatctaccaagtatttaaaattactggaaaatcttatcggatgaaaaataatttataaaatttttattgccgaaaacctacaaaaatatcctgccgatttcctacatttttaaactacccttgacaaagacagctaggaataacgccatcatgagtgcgccaaaattagcggtagggcgccagcccattagtgccgcggtgaccattgccatcccaccggaaagcaacaatcgtaagctatcaccaactaattgaccggcaagcggggcgattggcgcaattggtaggtcttaaaacggtcgaagattccctgattgatatcttctcgtaattgttgaccggaacctgaagcggcgtttaagatactctgtactaaaatcccagaaaccaacatcggtaaataggcgtggacgctgccggcaatgacaccaccgaataaatagccaaataacagcgtgaaaataattggctgcaccagcacatcactgacattatcaggattatgcaaggtcttcagtaaattccgatgggttaacgttaagctattgcgcaacacttgcgtatttgttttcatttgtagcatgttattatctccttagtttttaccaacggtcattttcaaaaagacgtcatctaacgatggggctgtcaattgtaaatcgctgatggtgatgcctgccagctgacattgatttaaaatcgcggtgatgacgcccatatcatcgtgcactaacggtccaatgattgtttgatccgtcacacgcacgggctgttgcaaaacggtctcgcaaatcgtctgagcctgggtaacttgttgttgattggcaaccgtcagctgcaactgctgaccaccgacttgcgctttcagctcactaggtgtcccactggcaatcaattggccatgatcaatcaacgcaatccgatccgcatattgatccgcttcctctaagtattgggttgtcaaaaagattgtcgagccatccgcgactaatttttgaatcacatgccacatttgcgtccgggttcttggatccagtccagtggtgggttcatcgagaaagaggatccttggcttgccaactaagctgaccgctaagtccaaccgtcgccgcatcccacctgaaaaagtcgccaatgtttgatccgctgattggtccaaatcaaagtccgtcagtaactcgttagctcgggttcgactcgctttggcactgagcccatttaaccgcccaaataagcggagattctcgcgcgcacttaagtcttgatcgattgccgctgtttgattggtgacactaaactgttggcgcacttggcggctttgtgttatcgtatcaaagccatttaatgtgattgtgccactatctggtcgtaggagggtggtcatcatttttaagagcgttgttttcccggcaccattgggccctaataatgcgaaaatctcacctttagaaacggctagcgaaacggaacgcaccacttttttggtcccaaatgctttttgaatattgtttacttcaatgacatgctcactgcacataatattgcctcctcatttaataatcaggtcacctgattaatttatatagtaaggtcacctgattaaaatgtcaaggattgctactcttagattttggaatggtgtatactaattaaaacagcgaagggaagatgacgtatggcaaagagtgtcaaggccgaattggtcgccggaaaattagctgaatatgaacaactcagtaagatctacgatgatatcgttaaacaagcacgcccgcatttaatcgtcgaaggccaggggaagattctattggcacttgctgatgaagatcacttatcgcaacgtgaactagcaacgcgtttgggaatgtcacctcaatcaaccagtgaatttgtcgctaaactcgctaaacgcgagctggtgacgttaagtaagctcccaagtgatcgccgggttaatttagttaacttaacggatgccggtcgtcaagaaattgaaactgccaatcaagaggtgccaccgtttgtgaacgccttgaccgaggcagaactcgaccagttagtgccactactcaacaagattacaacggcgatgtatgccgatatcgatgcctcaaatccgacgttgggcgttaagtttcataaattattggccggacgatatctgaaacaatttaaaaaataaccaaaaaaatagcgcgtctcacttaaattagtggggcgcactattgcatttaattaatcaaagtcgtaatcactatcttccatcgcttccacattccctaagcgataaccattcccaacttgggagaagaaatcgtggttggcagttgaagtcgacatcccattcaagatcacggggttcacatcttcagcgctatctgggaagagggcgccttggccgaggttcattaaggctttgttggcgttataacggaggtaagttaatacttcttctgtccaaccagtgccatcataaacttcgtgggtgtatttttcttcgttggcatataagtcgtacagtaaatcatacatccagttttgcaattcttcttgttctgacttatccaattcattgaaggctaattggaacttatagccgatgtaagtcccatggactgactcatcacggataatcaatttaatgatttcagcaacgttggccaacttattgttccctaagtaatagagtggggtatagaaaccagaatagaagaggaaggtttctaaaaagacgctggcaattttttgttgcaacggtgtgccgttttgatagatatcgttaatcttgttggctttgtattgcaagaattcattcgtgttggtccagtcgaagatttcatcaatttcagttggtgtgtttaacgttgaaaaaatggatgaataactcttcgcatgcacggattccatgaattgaatgttgtttaaaacggcttcttcatgttgagtgcggatattggcttttaagctggccatcccatcttgtgattgtagcgtatcaagtagggttaaaccgccaaagacatgcccgacgatccatttttcattgtctggtaaactgcgccagtcatctaagtcattggaaaggggaatccgcgtatctaaccaaaattgttcggttaatttttcccaggttgctttatcaatttgatcttcaacttggttccagttaattgcaatataattttctgccatgttcatgaactccttttaacgtgcttcttttttaggtatgtaggccagctgacgagcagctggagtggaaatttggtgcttgctttgaaacgtgcttttcaagctaactttctgcgcttagcccagtgaatcaaatcatcgactacttcgctaattcgcttccctatgctaatgctcaaaatataaacgcctgccgtcgcactctgttttgaaacgtgctttttgaaactgacttctgcgcttagttacactcggcgaataactgcttatagcagttattcgccgagttagactaatgctcaaagtcaaaccgtttcaaacgcactctagattacacaactttcgcatgcgtttgcgccgacttcactttcgtcgtctgtgtaagtccggatgtagtagattgatttaatccctttgtggtgggcgtagtttcttaagatgtttaagtcccgggtggtcattttgtcagtccggccgtttttccattcgtaaaggcctgctggaatcgttgaacgcatgaagagtgtcatactcatcccttggtcgacatgtttttgtgctgctgcgtagatgtcgatgactttacgcatgtcaatgtcataagctgattcataatatggcatggtatcgtttgaaagacctggggcagggtagtagattgtcccaattttcttttcttgccgatcttcaatccggttaacaatcggttgtaagctagcagaagtatcattgatgtatgaaattgaaccgtttggtgcaacggctaagcggttttgatggtataaaccgtcttgcatgatggctagttttaaagcttcccaatcggcttttgtgggaatcataatgtccttgaaaatcgctttgactttgtccgtcttaggggcccagtcttcagtgaggtattgatcgaagtaactaccatcagcatacttactcttttcaaagttggcaaaggtcatctgacgttccttagcaatcttatttgaagcaacaagtgtccagtagtttaaaagcatgaaataattactggtaaagtcgattgattcttctgacccatacatcatgtggttcttggcaaagaaggtatgcagacccatgccacctaaaccaatggtgtgggccaattcgttcccatgagccacagaagggaccacatcaatatcagaatgatctgtgacgtaggttaaagcacgcaccatggcttcgatagaaccaccaaagtcaggtgacgtcatcatgttcggaatattcgttgaacccaggttacaactgatatccgtccctaacacgtcatattcttggcggttattaatttgtgacggggtttgcacttggaggacttcagaacagaggttactcatgatgatcttcccatcaattgggttcgcagcattggctgtgtccacattgacgatgtaaggataacctgattcttgttgcaatttactaatttcattttctaaatcacgggctttaattttggttttcttgatgttatcgttggcgattaagttgtcatattctttggtgatgtcaacatatgagaaaggtacgccgtattctttttcaacaccgtaagggctgaataaatacatatcagcatcagctttcaccaattcatagaacttgtcggggacgactaagcctaatgagagggtctttaaacgatatttttcgtctgcattttcttttttagcacctaagaaagcaatcacatctggatggaaggcgtttaaataaaccacgccggcgccttgccgttgacctaattggtttgagtatgagaaagaatcctccaataacttcatgacagggaggacaccacttgctgcaccgtcgatgcctttgattggatcgccagctccacggaggttcgacaagctaatcccaaccccgccaccaatccgtgataattcaagtgccgagttaatcgtccgaccaattgaattcatatcatcggttgtttggagtaagaaacatgaaactaattcaccacgccgtgaacgcccagcattcaaaaacgatggtgttgccggttgataacgttggtggatcatttcatccgctagttgcagcgcaagggtttgatcaccatctgcgaagtagagagcattcacaaaaacgcgatctttaaaatcttcaagataaaagccattgtcgtttgtttttaatgcgtattgcgcatagaacttataagcagccataaatgacttgaagtggaagtcttggtcctttaaatattgattcaattcttccatgaatgaaagagaataagccttcaaaaaatctgcttcataataattttccgcgactaaataatctagacgatcttgaagtgatttaaacgtcaccatattgggttgtacgttttgttccaaaaaggcatcgagtgcttcttgatccttttgtaatggaatttgaccattcactggaatattaatttggttattcaattcatagtatgttacatcttcggttttaatctcttttaaagacatccttgccaccactttctagtcatattagctgttttagggtttaaaaaaagtgaagaccaactctttagtaatcaagagtcggcctcacccgttaaaactgggaatgcatggtgcttaaatcgccaatttttgcaattccgctggtctaaaacctgagaagctttctaggccatccgcttctaaaacgggaacggcttggaaaccttgttccttcaagtaatcaatatattgtggttcgtcattgatgttatgttcaacaaaaggaacgttgtgcgtttctaaaaagtgtttcgtcatccggcattgtgggcagccgttcttagtatataatgtgatatttgccataatcgttaactcccttgtatttctcttatcgataaaaatagtataccgttttgaaatggaagatgcaatcaataaacaccacatattgtagataaaacaaaaaacgaccactaattatagtggtcgtttacgaatgttcatttgattgtcttgggcaacgtcctgtacttaagttaaacatatttatgggtaaagtcaatccctgctaatgcgcaaaatttttcaaaagcacgccggacaaagcttaacagattttaaaaaattttttagattgggattaatttaatattgcaccatcataaaaatgagttaacgaacattttataaaattggtgaaagtaaccgtgaaaatttttgtttaaatttcaaccaagttgactgttgggcgattatttcgtctgttagtagggatgctttttccatatcagcctgatagatcgcttcaagttgcgctgcaactttcggatcgtaaataaacgtattggcttcaaagttcagcttgaaactacggatatccatattggcagaacctacagtgctgatatgcccatccatgaccgccgtcttagcatgtaagaatccatcttcataccggtaaatcttaacgccagctgcatgcaagagttgactgtagtattctgttgcacggtagatgaaggggtgatccggcatgttaggcgtcatgatacgaacatccaccccggacattgccgcagtcgtcaacgcatcaataatactatcatccggaactagatagggcgtttgaatccataaacgcttcttagcggtactaatcatcttcagataaccgagtttgatttgttcatctaatttatcgggaccacttgagacaatttgcatggctgctgatccacgattttgggattggtccactgggaagagttcttccgagtaagttaacttaatcgcagactcaacactcgcgttccagtccatcataaagcgtacttgtaaggctaacacggcattgccggtaatccgcatatgggtatcacgccaatgtccgaatttcttactccggcctagatattgatcaccaacgttaaagccaccaatataaccaatcttaccgtcaattaccacaatcttacggtgatcacggaagttcaagcgaaaatcggtaatcgtgtgttttgaactgaagaacgttcgcgcgtggccaccgacatcttcaagtgcgcgccaccatttttgcgttgcgccttgggagccccaagcatcgtagacaacgttgactgaaacgccttctttggctttttgaatcaatagttgttgtaactcattgcccaatcggtcattatagatcgtataatattcgatatgaatacttttttgagcttgtttgatgtcggcaaagagggcgtcaaactttgcttgcccgtcagtatagattttgacatggttattctttaaaacgggtgcattattaatatttaaaaagagattcaccatttcggatgcttcactggaaagcatctttttcggtaagaggtcgtttttacgattttccttacgttgaatgtcgaccaatgcggaaagcccatcatcgatttgcgattgactttggaaaatctttttccgcgataagccccgtccggtaaacatatataggataaaaccgcccacgggtagtaaaattaagactagcagccacgcccaggtggccgcaatatcgcggggctgtctcagaattgtaataattgccaataaggcattaatgaagatgatgaatgacattatttctgtaactaaaaccatatcgtactcctccaaaattctagcgttgcttattattttactaaaatcacgctcaaagcgctagttaagcctatcaacagtcagttaaatgaggtaatccctgttgggccagatggtgcgccccctgattctgacgctctggaatccattggtggatgaccattgaatagggcgcctcaagtgctagaatccggtcgacggcagcttgataatgtttagcataccgcttttctaggctctgaaagacaagcttgctgtcaacgttaatctgtagtattttcgtggtaagcccccgattggctagttgttctaagccaagaatgaccgccgcaaattctgcatcatgattggactgttctggcaaaggtgcttgtagttgatattgtcgctctggtgtcacgattaaaattcccgccgcacttggtccgggattgccacgagttgctgcgtccgtataaagtttaatcattcttaaaatttaccgcctttcactgacagcagggtcaggttaatggtatgatacaaagcgtaaaaaggagtgttctcatgcaaaagacaaccaccgcattctaccaaccaaattatgcttacttcgtgacgatttggtcttggattggcttcgtctatacattagctttaattgtacaacttgaactcatcaacttaaactggcaatcgtggggcatcggcttaattgccgtttggttgacgctatgggtcattttcgggcatcgtgtttcaatgacggcagacgtgatcacgcttaaacggccggtatttaaatataatcgaaccatcaaccgtgaaacgactacgaccattattgtccaaaaacatggtttattaattaaaaccaacgaacttgattaccaacccgaacaaatactccttagtcgcaaagccaagcaggcattcgttgaacaactgaaacaaaatggttggccaattgaagaatagttaaataaaaaagagccacgacaaacattaatcttgttgcgataatccctttatggttgtcagatgaaatacaataattcatctgacgactatggagggatttttgtatgcccagatctaaacatacggtactcgagaaattaacaatcttagatgaactgacccaatcaaaaattggactgggtccggtggccaatcgccatggcattaatcataagacgctagagcgttggcgagatcgatactcccgtgatggaattaatggtctaaaggaggctaagaaaaacaaacactattcgaaggaactcaagctcaaagtagtccacgcatatcttataggcgaaggcacctttgatgaacttgcaaataagtttggacttcgtggatcgcagcaagtcgtagactgggtaaacaagtataatgggaataaacctttgacggcgtcgccgtccagaaagcaggttcccactatgagccgtaaaacaaccttggaagaacgcattgaaattgtcgagtatgtcaccaagctgaatcattcatacacagaggccgctgaacgcttccaagtctcttatcaacaagcacgttcatgggtgatcaaggccaatcacggcggctatgaggcgctcgtggacaaccgtggccatcacaaagaacaagctgagctgactgaactcgataaagccaatcttgaaatcaggcagctcaaagcacagctcgcagacaaagagcttgtggaggcattcgcaaaaaaattgctggaaatccagcgcagggggtgagtaaacaacatcgactgtcttacttcgcaattaatgaggtcagtcaaggcaagcgtggtgcaatatctacgctgttggccgttgtcggtgtaagccggcaggcttactacaaagggttaaatcgagaagaaacagcttgggaagcccgtaatcgtcagctcaaggaacggacacaatactggtttgattttcatcatcaaggtatcggtgctgggaaccttttattgaatcttcaacatgatgacctaattgacttccccgttactttcaggatggtacgtcgtgtgatgcgggagctcagcttgacatgtcaaattcgggtcaagaagcacagtcgacataaggagaacgaacagcacattcaagacaatgtgctcaatcagaacttcgacgtcgacagtcctaatcaggtctggttgtccgattcaacggaactgacttacggcgtaaataataagtataaggtgcgcttgagtggcgtccttgatctctacggccgacgtttattgtcctacaatttgagcactactgaaacgtcagcagcagaaatcgaggttttccaacgagcctttgaggcttctggcgacgtccacccattggttcacactgatcgaggatcagcctacacctctggtgccttcaacaactttcttggtcgttacaacgtcacacgtagtatgtctcgaccaggaacaccatacgacaacgcaccgatggagcgctggtggaacgaattcaagttacggtggatggctcgccatccactagcaaagacttgcgaagagcttgtaagactggttgaggaaggaatcgaatatttcaatcaccacaaccgctcagcacaaagaaacggcctcaccccagatgaatactggagtgaagccgcatagagacagattcaactttatattatttcatttgtcaacttgacagggcctagtgcatgtcgtggctcttttttagcgtttaaacgtatttttattctgctatcttttgcacgttagctgcctgcaaaccgcgggcgccttctttaatctcaaataataccggctcgtctttattcaatgatttatagccgtcggtttggattgcggtaaaatggacgaaaacctcctcgtcatctccataactgatgaagccataacctttagcattgctaaaccacttaacgattcctcgttccatcacaatccctccttgaaatgttaatcagcgtacgcgcttattttaccacgtacaaagaagtgtgtcgaagaatatcgttctttttaagcatcccatctgccaattccgtacgtaatcagctatactaggtagtatcataaataaaaaggagctgggcggtatgtcagatattcaaatagcacaggaaaatgaagctaaggagatgcagccaatcacggcaattgccgaacaagctggtttaacggccgctgatttagaacaatatggaccgtataaagcgaaggttaatttcgctgccattaatcgattgaaagaaaaagaagatggcaaactcatcttagtgacctcaatcaatcccacaccagctggagaaggtaaatcaaccgtgactgtcggtcttggcgacgcccttcgtcaactagatcaatcagccgtcattgctttacgtgaaccttcactaggccccgtcatggggatgaaaggtggcgcaactggtgggggctatgcccaagtggtaccaatggcagatattaacttacattttacaggggatatgcacgcattgaccgctgctgtgaatactttagccgccctaatcgataaccatctgcaacagggaaatgccctcaacattgatccccgccgaattatttggaaacgggcgcttgatattaatgatcgtgcattacgccaagttgtcattggacttggtggtccagtgcaagggatgccgcgccaagatggttttgacattaccgttgctagcgaattaatggccattctctgcttagcaactgacattactgacttgaagcggcgcattagccaaatcgtcattggttacacttatgatcggcaacccgtcacagtcggcgagctcgaaatcaccggtgcaatcgcgatgcttttaaaagatgccctcaaaccaaacctcgtccaaacgcttgaacatacaccagccttaattcacggtggaccatttgccaatatcgcccacggctgtaacagtattttagcaacccaaacggccctaaaaatgggtgatattgcgattactgaagctggcttcggcgctgacttaggtgctgaaaagttcctagacatcaaagtcccacaacttggcaagactccggataccatcgtgattgttgccactgttcgggcgttaaaatacaacggtggtgttgctttagctgatctaaccactgaaaatctcggtgcgttagacaaagggtttagtaacttagccaaacatattgctaatatgcaacgttacggcattcccgtagtcgttgccatcaatgagtttacaagtgataccgaagcagaggttacaatgctccaagaaaaatgtgctgaactgggtgtcaaagccgttttagctagtgtttgggcacatggtggtaaaggtggccttgatttagcccaggccgtcttagaagcactcgatcaacctaaaaacttccaaccattatatgattcaaacgccgacattcaatcgaaactaaccacaattgtcactgacatctatggcggtaaagaggttgttttcgagggcaaagctatcaaccaactgaaagaaatcgaaaaaaatggctgggaccacttaccagtctgtatcgccaaaacacaatattcactctcagacgatccaaaagcattaggcgcaccaactgatttcaccgttcacgtccgtgaattgattccaaagcttggcgcaggcttcatcgtcgcaatgaccggcacagtcctcaccatgccaggtctaccaaagaaaccagccgccctcgacatggacgtcacagaagatggcctgattagcggattattctagagtacgtttgaaacggttagcttctgagcattaatagaatttgacgaattgccgatacaatcggcgatttggcaaatttggttaagcgcagaaagttagcttgaaaagcacgttttccaatatcctaacgcccatctcgaaaactgattgacaagtcagccgattttaaggacaatggtagattgtatgaataggaggttcccatgctcatctatatcgttttagccgcagtcattgtactcggtgaccaacttttaaaaagctggattgttgcccatgttgcctttgcagcaacccaacccgttattccgaacgtactgagtttaacgtatgttcaaaacgatggggctgcgtggagtatcttggccggtcaacagtggtttttctacctcgtcaccattgtggccctcggggtaattggctacttattttatacctctgatcgcactgaaaaattttaccggatcggtttaacgttgctgttagccggaacacttggtaacttcatcgatcggctccaccttaagtacgtcgtagacatgttccaaatcgaatttattaatttccccatctttaacgttgcggatgttgccttaacagtaggcgtcatctgcgtctttattgctattttgttgaaagagaaagtgactcatgactgaaactaaacaattaacgattacaactgaaacaggccggattgataaggcgctcacccaattactacccgattactcacgttcacaaatccagcaatggttgaaaaaagacttggtgcaagtcaatgatcaaccttgtaagagtaaccgcaaagtcgtaacaggggatgtcgtcaccgtcaatattccagaccctgtcacgctcgacttaaccccagaagatattccgctcgatatcgtctatgaagacgatcaagtcctcgtagtcaataaaccacaagggatggtggttcatccatcagctggccacccgaatgggacattggtcaacgctttattggcgcacaccccattgtctgaaatcaacggcgtcttccggccggggattgtccatcgaattgataaagatacctctggtcttttgatggtggctaaaaccaacgaagcccacgaatctttatccgcccaactcaaagctaaggaaaacttacgtgaatatatcgcgctagtccacggcaacatcgaagaagacgaggggaccattgatgcacccattggtcgttcaaaagtcgaccggatgaaacaagcaatcgtcgaagatggccgcccagcggtcacgcattttacggtcatggaacggtttgaagacttcacattaatcaaatgtcgactagaaactgggcgcacccatcaaattcgcgttcacttagcctatattaaccggccagttgctggcgatcccgtttatggtccccgcaaaactttagctgggcatggtcagttcttacatgctgctgtattaggctttaagcacccaacgacgggcgaaatgatgcgctttgaagccccattacccgcaatcttcgagaaaactttaactgaattacgtgaaaatcattgacaaatcaaggattctccgttaagctaggtctaacttaatagaagcctttaaaatcggtcccgtgaggccgagaaggtacggtgaaagcaccactagacgcggagtctctaactgtaacctctcgaccttatcggtttgagaggttttttgtttggaaggagtctttacgatggtcaaagaagtggtcgacagtaacacaatgaaacgggtctttactcggattacgtacgaaattatcgaacagaataaggggatttcagatctcgtcctcgtcggcattaaaacccgtggcgtgtttattgcccaacggattgcagaacgcctcgaacaattagaaggcatcgcattgcccgtcggtacactagacattacgttataccgcgatgatcaacatgatcttgatacacaaaatgaaccacagattaacgggagcgatattcccgttgatatcacaaataagcatgtcatcttaatcgacgatgtgctttacacagggcggacgattcgggccgcgcttgacgccttaatggacttaggccggccaaagaaaatttcattggctgtcttagtcgatcgtggtcatcgtgaattaccaattcgccccgattttgtcggtaaaaatattccaaccgcgctcaacgaacaaattcgcgttgcgatggaagaaattgatcaacatgatgggattaccatcgaaaaactaactaaataacgactgaaccgtttaattgtctccagagagagcaaaagggtttgtcttgaacttagtgcgcctaaaaaaaggggcctaagtccgtcaagggacacacctaccaatctgttggagcgtgtgtctttttttggttcaaaaagtcgtcgacatggaggaaatacttatggctacacaatttagaaatcccgatgcggtcttagacgtcaacgaacgccccagcaccggtaaatggattggtttatccattcaacatatgtttgcaatgtttggctcaaccgtcctagtgccaatcttagtcggtttaaacccagggattgcgttattcagttccggggtcggcactttaatgtacctcttgattaccaaaggcaagattccagcatacatggggtcgagtttctcattcatcgtgccaatgctcgctttaatgaaaacgactggctatcctgggattgcacaagggacaatggcggttggggcagtctacttaatcgtttcaatcttagtcagtctgattggttccgactggatcgacaaagccttaccacccattgttgtcggcccaatcgtgatggtgattggcttatcactcgctggcacagctgccaaacaagccactatcaatgcccacgggaattacgacttaaaattcttcgcagtcgctttactaacgttgttaatcaccatcggctttaatatgtatctcaaaggattcatgagcttagtccccatcttgctcggcatcattgctggctacatcatcgccgtcttgttcgggatcgtcgattttcaacccgtgatggacgccccttggtttaaagtaccagacttccaagtcccatttgtcacttacaaacccggtctgtactggggcgcgattctcagcatggcaccaattgcctttgtcacaatgaccgaacacatgggccacattatggtcttaaacaaactcaccaagcgtaacttctttaaagatcctggtcttcaccgcacgttagccggggacgggacagcctcaatcatcgccgcttttgtcggaggaccgcccgtcacaagttatggtgaaaacatcggtgtcctcgccatcaccaaagtccacagtgtctgggtcttaggtggcgccgcattcttcgccatgatcttcggcttcatcggcaaactgagcgcgttgattcaaagcatccccacacccgtaattggtgggattagcttcttactcttcggggtcatcgcctcaagcggtttgcgcgtcttaatcgacaaacaagtcgattttgataagaaacgcaacttaatgattggttcatcaatcctcgtcatcgggattggcaatgcctacttacaattaggccaataccaattctcagggctagccatcgccaccgtccttgggattgtcttaaaccttgttttaccggataaagcaaagagcgaacttgaattggaggctcaacaaaatgcaaaagcataacgcgttggtttccgttgatcaactcaccaatgatttagtcgcaggtctcatcaaccgcgctagcgcctttaaaaagggcgcgacaagcaaattaactcggccggtctacgcaatgaacctattctttgaaaatagcacacggacccatacgagtttcgaaatggcagaacgcaaactcggcatgaccgtcttagacttcaatgccgatacgagttcgacttccaaaggcgagaccctcagcgatacgctcaaaacggtacaagccattggcgtcgatttcgttgctgtccgccattctcagaataattactacgacgccttactcgcggatgatcaattccacatggcactggcaaatgcgggtgacgggagtgggcaacacccatcccaatgcttactcgatttaatgacgattcacgaagagttcggccactttgcaggcttaaaagtcgtcatctgtggtgacttgcgtcattcacgggtggcacggtcaaatatgcaactgctcaaacaactcggcgcaacattgtattttgccggccctgaggaatggttcgcccctgaatttgcccaatacggacaaccagcccaactcgatgacgtcttaccagaagttgacgtcgtcatgttactccggattcaacacgaacgctttgctgccgatgaaaccttatctgacactgcattccatactcagtacggtttgacaactgagcgggcagcacaccttaagtccagtgctatctggttgcacccagcacccgtcaatcgtgacgttgaaattgccgacgaactcgttgaagccccacaatcgcgaatttttaaacaaatgaccaacggcgtttttatgcggatggccatcattgaacacctattagaccaacaacatctgattcaacattaagagggggatctgctatgtatcaattgatcaaaaacggccaagtcttgattgacggccaactgcaaaaacgcgacatcgccatcgatgcaaccggtcagattacggcaattgaaccaacgattaccgcagtcccaaccgacccagaaacgatttatgacgcacacggccatttcgtcagtgccggcttaatcgacggacacgtccacttcagagatccaggcttcacgacaaaagaaacactcaaaacagggagcgcagcggttgcccacggtggttttactagcgtaattgcaatgccgaacttaaagcccgtacctgataacttgctagatttcaagacactggttgcacgcaatcaggcagaaaccagcgtccacacatatcaatttgcaccgattaccaatgagttaactgaacaaacaattgtcgacatgtcggcgtttaaggcagctggtgcagcaggctttaccaacgatggtcatggggtacaaacggcacaaacaatgtaccaagcgatgcagatggccgcccagattaacatgcccatcgtcgcgcacgtcgaagatgaatcactcgtcaatggcggcgtcattcacgacggtcaagccgctaaaaaactaggcgttcccggaattgcgagtgtcagtgaatccgctcaagtcgcccgggatatcgagctagcgcgggcgaccggcgttcattatcatatctgccacatctcaactaaggaaaccgtcaatctcgttcgccgcgcaaaacaagatggcctcaacgtcacttgcgaagtcaccccacatcatttgttactcgatgattcagcgattaccagtgacaacgcaatgctcaaaatgaatccgccacttcgaacacttgcagatcgccaagcactctgggcgggcttaatggatgggacgattgatattattgcgaccgatcacgcaccgcataccacagaagagaaacaacaggcgttattgaaagcgccatttggtatagtagggagtgaaacagcctttagcttgttatacacacatttagttgccaacggtccatttagtctcgcgcaactgacaagctggctaacaaccaacccggcccatgttttcaacttaccacacgccggccagttagcggttggccaaccagctgaccttgctgtttttaatttaacggataccaccacaatcgacgcaaacactttcttatcgaaaggccacaacacgccatttatcggcgaagcagtgcaaggtgatactttattaaccttggttgctggtcagattgcatatcaaaaggagtgaactaaaagatgaaacgttaccttattttagaagatggcaccatcttccccggcaccggttttggcgccccaattatctcgacaggcgaaatcgtctttaacaccgggatgagtgggtaccaagaaaccattactgatcaatcatacaacggccaaatcatcgcttttacataccctttaatcggtaattacggggtcaaccgcgacgactttgaatcgattaaaccaacctgtaaaggggttgtcgtccatgaaacaccacgcctagcaaataactggcggatgaatatgagtcttgatgactttttaaagcaaaagaaaattcctgggattgccggcatcgatacgcgggcactcactcgccgtctgcgcgataaagggaccatgaaagccagcatcgttgatgccgcagacgatcacgcgttcgatcaactcaaggcattggtcttaccaaaaaaccaagtccaacaagtctcaacggccaaaccttatccgagtcctgctaacgggcggaacatcgtcgtgattgactttggcttaaaacatagtatccttcgtgaactgtcaaagcgcgactgtaacatcactgtcttaccatacaacacaacagctgaagaaattctgagtctcgatccagacggcgtcatgttaaccaacggccctggtgatccagaagatgtgccagaagccattgaaatgatcaaagggattcaaggtaaagtgccgattttcgggatttgtctcggtcaccaactttttgccctcgccaatggggctaaaacctacaagatgaagttcggccaccgtggtttcaaccatccggtccgagaagttgccaccaaacggatcgacttcacatctcaaaatcatgggtacgccgtggatgccgactccatcgacccacaaaaccttctgattacacacgttgaaattaacgatcaaacagtcgaaggtctccgtcatagacaatatccggccttttccgttcaattccatccagacgcagcccctggtccacacgacgctgcacatctattcgatgaatttatcgacatgatcgatgacttcaatcgccgccaaaaatagtaaaaaggggatttagtgatgccaaaacgtaccgatattcataaaattttagtgattggctctggcccaatcgtaattggtcaagccgccgagtttgattactcaggcactcaagcctgcttagcgcttaaagaagaaggctaccaagtcgttttaattaactcaaatcctgcgacaatcatgactgataaagccgttgctgatacggtttatatcgaaccgatcacgattgactttgtcacgcaaattctacgcaaagaactcccagatgccatcttaccaaccctcggcggccaaaccggcttaaatatggctttggaactggcaaacaacgggattctcgccgagctgaacattgaattgctcggtaccaagctcagcgcgattgatcaagctgaagaccgcgaactgtttaaaaacttgatgaatcagttaaacgaaccgattccagaatctgcgattgcccattcactcgttgaagcccaaacattcgttaacgaaaacggatatccggtcattatccgtccagcctttacccttggtggcactggtggcgggattgccgaaaatgccggtgaactgagcacaattgtcaaaaacgggcttagcctatctccagtcggacaagtcctcgttgaacaaagtattgccggtttcaaggaaatcgaattcgaagtcatgcgcgacaaaaatgacaacgcgctagtcgtctgcaacatggaaaacttcgacccagtcgggattcatactggcgattccatcgtatttgcacccgttcaaaccttaagtgaccgtgaagtccaagcattgcgcgatgccgcacttaaaatcattcgcgccttgaagattgaagggggctgtaacgttcaactcgcccttgatcctaatagcgaccgctactacattatcgaagtcaatccacgggtgagtcgttcatcagcccttgcttctaaagcaactggctatccaattgcaaaaatggcggctaaaatcgccatcggtttaacacttgatgaaattcataatccaatcaccgggacaacctatgcgcaatttgaaccgatgctcgattacgtcgttgcgaagattccccgttggccatttgataaattcaacaaaggtgatcggcaactcggcacccaaatgaaggccaccggtgaagtgatggccattggacgcaacattgaagaagcattactcaaagccgttcgctcacttgaaattggcactgaccatctcgaaattccagcattgacggcagtcggtgataacgaccttgtccaacggattgtacatccccaagacgaccgacttttctaccttgccgaagcattgcgccgcggttattcaattcaagaacttagtgaattgacaaaaattgatcttttcttcctggataaactcagccacattgttgaaattgaagaacaactccggaccgataaaggtgacttagaattactcgaactcgccaagaaaaatggctttgccgacgctaaaattgccgcaacttggcaaatcatgcctgcccaagtccgccaaatgcgccaagaaagtggcattcagccagtttataagatggtcgatacttgtgcagccgaattcgaatcacaaacaccttattactacgcgacttacgaacaagaaaacgaaagcattgtcagcacaaagccttcaatcttagtgattggttccggtccaattcggattgggcagggggttgaattcgattatgcaaccgtccactgtgtgcaagccatccaaaaggcgggctacgaagcaattatcatgaacagtaatccagaaacagtttcgactgacttttcaatttcagataaattgtacttcgaaccactgacactagaagatgtcctcaatgtcgttgaactcgaaaaaccagaaggggtgattgtgcaattcggggggcaaacagccatcaaccttgccgaaccactgaccgaaaatggtgtgcagattctcgggacaagcgtcgcgaacttaaaccgcgctgaagaccgtgaccaattcgatcaattaatcgccgaactcgacattccacaaccagtcggggcaaccgcaaccaatacgccagatgcgttgaagattgctgaagagattggttatccggtcttaatccgacctagtttcgttttaggcgggcgggcaatggaaatcgttcatactgcagaagaccttacacattacatgaaagaggccgttaaagtttcagtcgaccaaccggtcctaattgaccgctacttaatgggcaaagaatgcgaagtcgatgccatctgtgacggcaaagatgtcttaattccgggaattatggaacatatcgaacgcgctggtgttcattcgggcgattcaatggcggtttatccaccacaaaatctgacggatgcggaaaaacaagccatcatcacttacacgaccaagctctgtttagcacttgaatgtcgcggcttgttaaacatccaattcattatccaaaatgaagcagtctacgtgattgaagtcaatccacgggctagtcggaccgttccattcttgagtaaagtcaccggcatctcgatggcgcaactggccacccaagtcattttaggcagcacactagctgaattaaagagcccaaccggtctattaccagcgggcccactaattcatattaaagcacctgtcttctcattctcgaaactcacgcgggttgatagcttactcgggccagaaatgaaatcgaccggggaagtcatgggaactgacgtaacgatgcaaaaagcactctataaagcgttcgaagctagtgggatgcacttaccaagtcacgggaacgtcttaatgacaattactaaccaagataagacacaagcgctcgaattagcaaaacgcttccgcgaagttggctatcaaatcattgccacgcctgggactagtcaagaattccaagcagcaggtgtgccagtgcaatccgttgccaagattaatgctacgagcggcgatttacttgataaaatcaaagccggccacattcaactggtcatcaacacaaccggcttgaacgaagccccacaagtcgctaaagacagcatcgtcattcgccaaaccgccattgaacacggcattccattgatgacctcattggataccgctgatgcgatcttagcggtcctagaatctcaatcgctcctgaccaaaccactttaaaaccactaaaagagtctgaagccctttgcctaaggctcttttattacataaaaatcagaaggagtctgctaaatgttgccattagaataccaattaaccctcactaagcaaaccgaaattgcccccagtatctatgaattatgcctcaccggagacctcgcacagcaacccattgcaccgggacaatttgtcgatatcaaaatccccagtgacgcccttttattacgtcggccatttgggattgccaatgtcgaccgccaaactaacacgattaccttgttataccgcgttgttggtgaaggcaccacgatcttaagtgaatcaccggtgggcacaagcttgtccgtcttagggcctcttggtaacggttatccaattgaccaattagtagccggacaaaacgcgctaatcattggtggcgggactgggattccaccattacatgaactctcacggcaacttaatgcaaaaggcgttcacgttcaacacgtgttcggctttgcaactaaagcagccattttctatgaagatcactttcgcaagctcgggccagtcgcttatgcgacaaatgatggctcgtacggctaccaaggccatgttggtttattactcgatgcacagtttgctgatgcgacaacccgatatgatgccatttacgcatgcggaccaaaaggcttgttaatggccgtcgataatcgattcagtgagcatcccaatgcctatatctcattggaagaacggatggcttgtgggattggtgcctgctacgcctgtgtcaccaaactcaaacgtgatccaagcattcagctcaaaatttgcgatgacggacccgtcttcaaaacaaacgaggtgctcatttaatgacagacttagcagtaactttaccaggcttagctttaaaaaatccgattatgcccgcctccgggtgttttggcttcggtcaggaatacggtcgctattatgacctcaacgaacttggcgcaattattatcaaagcggcaacgaaagaaccccgacttggcaatgcgacaccacgggttgctgaaagcccaagtgggatgttgaacgcgattggcttacaaaatcccgggattgaagtcattatgcaagaaaaattaccctggttagccgagcattatcccgagttaccaatcatctccaatgtcgccggcaataccgaagctgattacgtcgctgtctgtgaacaaatcagccaagcgcccaacgtccatgccatcgaactgaatatctcgtgcccaaacgtggcccatggcggtcttgaatttggcacatcaccagaagccgctgccacgttgacgaaggcctgtgttgcagtcagccaagtgccggtttacgtgaagctctcaccaaacgtgacggatattcgtccgattgcgcaagcagttgaagcagcgggggcagccggcttctcattaatcaatacactggtggggatgcggattgatccaaaaacacgccaaccaattctcgctaatcaaacaggcggcttatctggaccagcgataaaacccgttgccatccggctcattcatcaagtccgttcaatttcgaaattaccgattattggaatgggcggtgtctcaacagctgaggatgcacttgaattaatggccgccggcgccaatgccatcgcagtcggcactgctaatttcagcgatccatttgcctgtccaaaactaatcgccgcattaccagatgaactcgctaaatatcaactaaccgatttaaaatcattcggtctaccacaggagggcactcatgactaaccctttaattatcgcgctcgactttccaaactgggaaacaacagatcgttttttagtgcaatttccaactgatgaatccttattcgttaaagtcggcatggaacttttttaccaagagggaccacagctgattaaaacgttaaaagcgcgcggctatcggatttttctcgacctaaaactctatgacattccaaacaccgttcaaagcgcgatgactgttatcggccaactcggtgtcgattacacaacgattcacgcagctggtgggcaggcaatgctcaaagcaggggcggctggtctgaaaaaaggcgccacacttggcaacgtgcggcccgctaaactactagcgattacgcagcttacgtcgaccagcgaagcgcaaatgcaaaccgaacaactcgttaatgtcagcctaccagaatctgtcgcacactatgcgcaactcgcacagaactcggattgcgatggcgtggtctgttctgctcaagaggtgccaacgattcgcgaacacaccaatgctgattttctctgcgtcacacctgggattcggccagcaacaagccaaaccaatgatcaaaaacgggctgtaacaccacacgaagccgcacaagctgagagctcggcgattgtcgttgggcgcccaattacgcaagctacaaatccatatcaagcttaccaagctatcaaatcagaatgggagtctttcaaatgacaacaattgcacaccaagtcgcacaagccttaatcgatattcatgccgtcagtctcagtcctaacaacccttttacttgggcgagtgggctaagaagtcccatctattgcgataaccgtttaacgattggttatccaaaagtccgcaagctcattgccagcaacttagctgcggcaatcaaagcgcaattcccagacgttgaagtcatcggcggaacagcaaccgcggggattccccatgctgcatgggtcgcagccgaactcgacttaccgatggtttacattcggtcgaaaccgaaagatcacggtcaaggccgtcaaatcgaaggaccgtttaaagccggtcaaaaattagtcctcattgacgatttaatttcaaccggcgggagtgtcttacaagcagcggccgccgctcaaaaagagagcgcagaagtccttggtatttttggcatcttttcatacgaactagcagccggccaacagaatttcgcaactgctaacttaccactaacgaccttatcgaatttctccgccttattagcggtcgaagaagccgctgataacttaactccagaacaagctacatcactcaatgaatggcgccaagacccacaagcatggtcagacgcccattagaatagagtgttaaccggaaagtaatggcttgcagaacacgtttagcgtgtgccatcagccgcaccaatcaaagaagcgttaccccaattcactttggagtaacgctttttattagtcttgcacaggtttgttacgtagcttttgaacgagttgctcgtctggtgtcgtataaagtgtttgttgcccttcgtaaatcacaaaccctggtcgcgcaccgttcggttttttaatcttcttaacctgaatataatcaactggcacggccgctgataagcgcgccttcgagaagtaggccgctaagttgccggcttcttgaagcgtatcttctgatggatctgggctatcaataatcacatgagacccgggaatgttcttcacatgcaaccagatatcagttttatgggcttttttcaaggttaattgatcattttgatagttattcttgccaacgaaaatccgggtaccatcactcgcatagaaaacttcaggttcactaatcttgtaacgtttctgcttcttggcaccggttttcttagcctttaaataaccttcagcctgtaattcagctttgatatcctctaaatctttgggttcagcaatttcaatttgcgccataatcgtgttgaagtaggcaagttctgcttcggtctttgccatttgttcattgacgtaggcaattgaattccggagcttctgatatttcgagaaatacttctgcgcattttttgaagggctaatctggttcgacaaggtaatcttaagcggttcgttattgtcgtagaaattgggcaacgtgacttcagtcatgccacgttcgacttcccgcaaataggtggtcaaaatttcacccttaatccggtaatcatcagcactgtcggctgcttttaacgttttttgtagttttttcagtttcttttcatccttttgaatctcgttgcggatgaagtggatgagcgcaccaccttgttgctgcactcggtcacgctgcgccttgtgtaagtaatattggtctaacagctcactcaacgtgtcaaaatggctcagtgtccctgtcaggctctcataagggaaggccgtgaaccacgacttcttttcaccaactgttaacgttggtgtcacttggtcgaattgcttgaagaaatcagtcacaaccgccaaataattgtcatgatccattaaacgggtttgtagttcaacggcactttcacgactcatcccttggaagtgttgttgtaaccatttgacttgttcatcagcagcttcgttataataacttaaccaatcaagcgtctttaaatcagtcgtaaaaccatcaaccccggttgcagccggtggactaacataatcggcaccaggcattaagaaccgataacggttttgcgaaacaccgacgtgccggattaaatcgagaatcttattggtcgcttgattaatcaaaatcacattactatggcggcccatcaattcaacgattaagcatagttgttgtaagtcccccagttcattccgtgatttaaatgtgaatcttagaatccgatcactttcaatttgcttgatgttttctaaaatggcgccatctaaatacttccgtaaagacatcgcgaagttcggtggcgttgcggggtttgcataaggcacccgcgtcacttgcactcgcgcataagatgggtgggctgataggagaaggggataggtcttacgatttgcccgaatcgttaagattacttcgtttggataaggttgttgaattttcgtaattttgccgtctgctaaagttgtatttagctcatttacaacggcgtgggtcattaaaccatcaaaggtcattattgctcacactctctataattgaattgtcttacttattgtaacggttttgcagtggaacctcaaagaaattagttgtttgcaatcgctaacacgactattgtataatacaattatcaaattgctttatacaattaaagggggatttaccgtgcgctcaaccttagcaacgtttaatcaactgaatctattgtatcaagaacaaaagaaacactgggcgctacgactcgacttgaagttagcccaagtcaatattctaatggccattgaacccgatcaagaacgcatttcgcacgcagaattaaccacgttaaccaaactcgatgcatcgacactcagtcggcagttaaatacgatggctcaagaagggctgttaacaaaagtgaccggggctgatccgcgccaacgcgtttacgcattaacaccgaccgccaaaacggcattaagtacgttgcaacaacttcaaactgaacttgaaaatcacattcaacaaaactggagtaccgatgaacagcaacttttaaaaatcctactgaaccgttattatcaaagctttaatcgaccattaaaatgagacgccctatacatttttcggaaaatcggcatttttaggggaattaacctaccatttatgatatagttattaccgaataataaaaaagtaggtgtcaccatgaaaattgctgtagtcactgatagtaccgcttatctcacagaacagcaagtgaaagaccatcatctcttcgtcgtacctattccggttatccttgatggccaggtctatgatgaaggcgttgatataaccactgaagagttctatcaaaaattaaaaacatccgaaacattccccagtacatcacaaccaccactgggtgaaatgttaaaactatacgaagacctcggcaacgaagggtatgatgctgtcatcagcatccaccttgctagtaccatctctgggtttgtcacgacattgaaaaatgcggcaagcaccatcgataacatccaggttgtcccatacgattcagggattactgtgatgttaatgggctacttagcaatggaagcggccagaatggcacgcgacccagaagtgaccgtcgaccagattatcgcacgccttgacgatctaaaaagcacaatggatgaatgtttcattgttaacgacttacaaaacttagtgcgtggtggtcgtttatcaaacgcatctgcttttattggtagcatgttgaagattaaaccgcttttaacgtttgacgctgacactaacaaaattacggcatttgagaaggttcgttcattgaagaaggcttacgcccgcgctgaacaaatttttgctgaaacagccgaacgtgttgactatccattacgcgcactaatcattcacgctaacgatgaaccagcagcgattgcatggcgtgataagcttcaagcaaactatccagacttaccaattgatatcagctactttggcccagttatcgggacccatcttggtgaaaaagccattgcacttgcttggattaaagattttgataaagcctaatttaaaagcctgtcgaacaattcgacaggctttttttgtgacttataagatagaaacgggttcttctaaggtaaccaacttcgtcccaattagcttataaataacggatttaacggctactttttgaacaatgttgagcggttcctcgtttaaattgaattcattaaccgttgattgcgcgttaatattcgcaatttcggcattaaataaccgcacaaactgatcatatgccttaccagcggtgtcgtttgccaacgattgcgaaatcccttgtttaatgacatcgagcgggaagactaatttcataatgctgaccacaatcaattcggctaaatgatcccgattatagcgtttcttttccggtcgttcaataatcgccattttgacatagctattaatcattgttttcgttattttaacgtccaacaaaggactcagtcgtttattgacctcactaatgacttggtccatatagaggtctaaatctggaaattcagaccataatggtaaccgcaattgttgaaagtcacccaaccatttttcaaattcttgtgattgcatactgattaacgccaccaatctgttgatagtatatttattatgccatagcaattatcatttgtcactaacatagaatcgaattctattatctattgacttataatctacattcgcgctataatactcggcaaatagagaaaaagaggcgagaaccatgcaactttccacgattaaacgacaacaactgatttatgaaatatggaatgccattacccacgggattggttttttcggtagtttaacgttagtcatcatgctcctggtcaaaagcattcataaaacactctcaccagtcgcgattgctagtctagcagtgtatggcgccacattactgctactgtatctcgcttcgactttatttcactgcttagcatttaccaaggccaagcgcgtgtttcaaatattcgaccatagcaatattttcttgctgattgctggtacctacacgccatattgtttgatttttattggccatgcaacaggaattagcttactgattgcaatctggacactagcgattgccggtattataacgcacattttgagccacggtcggtaccaaaagattgaaacaacgatttacgttgtgatggggtggttatgtttattagctggtaagaccctttatgtcaacctcagtccagttggtttttggctgttagtcagtggtggcgtagtctttaccgttggcgctctaatttatagttttcctaaaattcctggcttacatttgatttggcactttttcgtaatgctcggaacgaccctgatgtttttttcaatttacctcaacatttaacttgaaggagtacaactcatatgacaattaaaattgtaacggactcatcgattcaactgacagcagacgaacgcgccaaatatgacattcacatcgtccccttaacgattcaacaaggaaatgagtctttcattgatggacaaaccattacccgcgctgaatttttaagtcgcttacaaaatgcaacgaccgattttccaacaacaagtcagccaactgtcggcagtttcgtcgatttatatgatcaattaggggctgatggtagtacgattctatcgattcattgtaccggcttgttaagtggcacaatcgaaggggcacacacagcagcccaccaatcaacaagtgacgtacacgtgattgatagtaaagcaatcgaccgtggacttgcttatcaagtggttgctgccgcccaagacgttgaagcagggaagcctcttgatgatattatcgcgcatcttgatgacatccgtcgtaaaaccgaaacctacgtctttttagattcacttgacgcgcttcaacgcggtggtcgaattagtagaatggccgggctattaacgaaaatcattaaactcaaggtaattgtgcgcttaacagatacggaattagaagtcgtcgcaaaggggcggggactaaaagcttttacaaaagaaatcaacaatatccgtgaatacttagccacccaagacgttgcggaaatcggcatctcacacgtcggaatcacggatgaactatccgctaagatccaagcaacgcttgaagaaacacagccccatgtgccttatacagtcgcactaactagcccggtcattatgagtcacgttggcctaggggcgtttggtattttctatcggacaaaataacagctgacaagaacgtctcattcgaggcgttcttttttattgccccttaaaattgtgcaaaatatagttgcgttatttcaaagaatcgtttatattagaatgaacgttctaataagagaggatcatccagatgcggacaaaaacatttgaagcaccggttgtcttagacaaagccatgcttgtcttttggcaacaaggctatgagaatacctcaatgcaaaacctagttgatgcaatggggattcaccggcgcagtatttacgatacattcggcgataaacatgaactgtttatccaagtactagcacattatcgtgaccaaattaacgagcgtttcgagcaagtactggcaacacataccgatttaaggtcgcgcttaacagccatttttgaaatatttattgaccatccggataaccaaccagccggctgcttagtggtgaataccgcggcaacgttaaattcattagaaccagacatccaaacgctgattcagcattatttaacccaagaaaaagcactgttgcaggcattactgattgccggccaggccgaactagaaccgtctgttgcaattgatcttttagctgcatcgcttcaaagtgcgctcattggtatccgggtcatggctaaagtgaacccagattcaactacgctaacagcaattgtgcaacaaaccctacaaacactcccgtggaaagaggttttctaatatgaaagcagctcaaattaaaaaatataatcaaacactagctgtcacgattcaagaaattgatcgcccacaaccgctagccaatgaagtactcgtcaaagtcgcctatgcagcggtgaatccattggatccaatgaatatccgcggcgatactaaattaatgcaaaactatgctttaccactgactttaggcaatgaaattgccggtgaaatcacagcgattggaacagacgtcactgatttcaaagtcggggatcaagtctatgcgcgtttaccattggctaaaatcggtggctttgctgaatatgtcgcggttaccaccgatgcaatctggtacacgccaaaggatttatcgctacgtgaagccgttgcaatcccactgactggcttaacggcttatcaggggctatttgaggaattggcagcccaaccgaaccgaacgctgtttatccctggtggttcaggcggtttcggtccaatagccgtcccaatcgcaaaatcactaggcttaaccgtgattgtttcaggcaatgtagccgcgcgagatcacattttgaatttgggtgctgaccaatatatcgattacaaaacaaccgattactgggaagttttagatcaaatcgattacgtgattgatacacgtggtggagcagatattgaacgtgaaatggcgattatgaagccgggcgggcggattttaagcttgattgccggtccaaacaaacaattcgctaaacaattgcaattaccattttggaagcaactcttattctcgttggccgggcggaaatgggatcgcctcgctaaaaaagcgggcgttgaatatcgctttattttcgttcgttcagatggtgcccaactcaaaaaaatcactgaaattgttgaacaacaagcgattgtaccagccatcgatccgcatcaattcgatttagcacacgttaaagaggcactagaacttgttgctcacggccatccaactggtaaagtggtgattaaggttcaagcgggctaatcaagatgacttatctaacaacccccaaccaatttattcaagatcaacaaggccaacggtttgcttaccgcgaagtgggtaccggtcgcggcttaccacttgttttattgaatcacttatcagccactttagataactgggaccctgcattaattgacctgatcagtcagcaacgacgcgtgattgtctttaataatcgtggtgttggtttctcggatggcaaagtccccacgacgattgagcaaatggtagctgattgttatgcttttataacagctatgcagctcactcaattcgatttacttggattatcgatgggtggttttgttgcacaggccttcactttaaaatacccctcaagcgttaatcacttaattttagtcggaacaggtccccagggtgactcagaaatcgccaaagtggggcgcataacaacttttgacttaattcggtccttcttaacgcatagagacgttaaggaatacctcttcttcaccagaacgccccaaggcaaacaggctggtaaagcgttcattaaccggttaaaacagcgtgaaattgttgaagataaagccattacgttagccgcttatcgtcgtcaattaatagcaattaaacagtatgcgcacgatcaaccggcaaacctggcacaaattaaccaaccaacattgattgtcaacggcgatcacgatcgaatggtacctgttaatggttcatatgaattacatgaacggattttaaattcccaattaaaactttacccagatgctggtcatatggcgttattccaaaatccaaatgactttgcagctttgttggctcagtttttaaatcactaattacagaagcgtcattttaatatggcgcttttttgctgcgcttaaacgctggtgacgagtgggtaggcttagttaattttttaaatctattttagtttacataatatatattatgcgaagaaacgcttatcccttgaaagagcgctaaaataaccacttattatccaacatcattcaattgatttgatgaaccgcacttaacgcgtttgttttttacactgcacgattcataaactattacaagttactcaacgccaatatgatgaatcaaactgactggccaaccgatatcgccaaacttaactttaaatgcagaattcatctaagctcaggcacaaatccgtgattaatctgacgattatgccagattttaattggtaaatacgcatattaacacatcttagccttaaaactcacatatcaaatcgttaaaaaaggccttaaacgttgatataccagcttttaaacggaataaggatctttaggttgctgtgcagatagtcgaataagaccatctgatcatcagttcgcggaacggtttgcaatacaagtgttgttaaaattatggttttaacaacacttgtagtattctcacctcatttttgctaaactatctttaaactgctaattaaggagtcttccatcatggatcaacaacgttacttagaactctgcgaaaagcaactcgccaatcttccggattacattcgtaaattctacattaaccgccaggcaaacgcctactcttctgcaacgctctatcaatacttacaagaatacgttcgctttttcacctggttagttgatgaacagatcgtcgtggtcccctctatcgaccagatgccactgaccgcactcgaaaaaatgaaactcgaagatattgagctctacaagatttttctaatgaataagcgtaaacaaaataaccataagctctcctttcaagccgttaaccgctcgattaacgcattaaatgcgctctggtacttcttaaccattgaagccgaacaagctgatggtgagccttatttttaccgaaacgtcatgaagaaggtgaaactacttaaagcttcagaaacaatggcgacacgttcacgacacatcagcaaacaactgctgaccggtgaaaagaaacacgacttcatcaccttcatgcaagttgattaccctaacttgctttctaatcgccaactggcatcatacaagcaaaattgcgaacgcgatattgccatctgtgtactggcgctggcaacgggcatccgactatcagagttggcccaagccaacatcaacgatttgaatcttgaacaacttacaattaccgtgatccgtaaaggcggacagcaagatactgtcccaattgctccgtggagtttaccttttttaagggattactgccagattcgtaaatcacgctatctaaaagaagataatgaacaagccttatttgtcagtcgctatcgtggcagcgccaagcgtatgagcaactatgccattgaaaagttagtcgcgaagtattctgaagcatttggcgtgcgtctcacaccacacaagttccgccatacacttgccactgatctcatggcggcaactcatagtgaaacaattgttgcgacccaactaggccaaacgaccacgcaagctactcacttatatacgcacgtcgttgctgatgaacaacgctcggcaatggaccagcttgaatagccactattagtgctcttcttggcaacgattatcaatgtcgttctaacagtcatttggtttacatcaattcgtcgatttacacattgcttgacttataccagctatcgagtatactgaaagcgttcctaaaaattaaatgttaaccatcgcaaaggggagccattggctgagagtgattttaatcagacccttcgaacctgtttgttaagacaagcgtaggaattgtgatggagttgaaatgataactccttttttgtgttggttgaacaagaaaaggggttatttttatgcaacatcagcgtctattgattcagattgaaggggcaatcatcgcggcatttgccgtggcattggaatacatcccccatacagtggggccttccgcaatcgaagtctcctttgggattatccctattgtaatctacagtttacgccgtggtgccattcctggaatggtctccggcttaatctggggtctactagacttaatcttacgtggattaggaaacggtagtgtcttgaacgtatggcaaggattgctagaatttaccattgccttcatggttgttggtttagcaggtatcttacaacgacctattcaagcaagtattcaaaatcatacaaaagtcaaaacgatgacccttttatggatggccgcattttttggtacttttgcaaaatacttctgccacttcttagccggtgccgtttattggggctcatacgctcccaaaggtatgaatgcttggctatactcgctcactgttaacggtggcagctttatcgctagcttcattctaaccggcatcgttctatgtatttgtttagccatggtgcctaagttatatttaccaaaagacatggttttacacgtacaatctgaaaaataaacaaaaaaagagccgtattaacacttgaatggtgttaatacggctctttttaattcccttaacgatccgttctagctcgtaatgcatataagattgaaactgtatcgacaacctcttggaataaagcccccactaatgctggaacaatcccggtgctggcaatcaacattaacccaatacagattgcaatcccaatcaaaaccgcctggcgagcaacgcgcatcgtgtcatgcgcgatttgaacggcacgactaacccgtcctaaatcatcttttagaatcaccacatccgctgattcacttgcggctgttgcgccatgggcccccatcgcaatcccgacatcagcacttgccagtgacggtgcatcgttgaccccatcaccaaccataattagtgggcgttggtcttgcggtacttgttcaattaaatgaatcttatcgactggcagacagcctgcatggacgtcatcaattccgacttgttccgcaatctggtgcgcagttgtcgcttgatcgcctgtcaacatcatcaaacgcgtaatccccagttgatggagcgtctgcatcgtggccggtgcttctggtcgtaaatgatcgataaacgtaatgtaccccgcatattgatcattgatcgcaacgtaaacagtggtttgttcttgcagaggctgttgcgcatctggcgtcacgaattgatgtttcccaacacgaaccgtttgtccagacgacagcgtcgcaactaccccagcgcccgttgcttcttttaatgtttcaattggttgtaattgttctacctgtgccgctttaacaagtgaccgtgctaaaatatgcgaagattcttgctccgcactagccgccaattgcaataaatcggttggtgcgataccaatcactggcacaacttggtcaaccgtcaattgaccattcgtaattgttccagttttatcaaacgctgctgatttagcagacgctaatttttcaattgttgtgccagccttgacaataatcccgtttcgactagcacgactcatccctgagattaacgcgataggcgctgccaatattaatgggcacggcgaagccacgacaagcacttctgcaaaccgtactggatccttagataaccaccaagctactccagcaatcacatacgcaactaatgtaaatggcacggcatatcgatcagctaagcgcacaaaatgcgctggttgtgccgcagaggtctctacaagccgtacaattgcttgatattggctattaacggctaattggtcaacttgcatggtaaccgacgtatcgccgttcacagagcctgacatgagctcatcatttagtgctttttcaacggggcgtgattcacccgttaacgatgattcatcgaataaagcacttcctgcaataatatgcccatcaacagggaccaattcgccaggtttaataatcacttgatcaccaacttgaagcttatcgactgaaacatcttcgaccgcatcattaacaaggcgatgcgctgtttgcggagaattatcaagtaatgtctttaactcacggcctgctttatgcgctgcatagtcttccaatgagtcgccaccagttaacatgaccaagaccattaatgccgcccaatattcaccgaccgctaacgtcgcaataatagcggtaatcgctaatagatccaccccgtattgaccagattttagcgttttaatcatctcaataaacatcgagagcgctactaagctccccgctaaactcactaaaatctgtgcccacaatggctcatgtagcaaaaacgccaagcatagcgcaatcacacccacactaattgttaaggcaaacttgatggtatgtttcatcgtcaatcgctccttcttatgaattcatttacattataacacatttttagttagattagaataattccaatctggtggcacacaaaaaagcccccaaattaatgaggggtcttttttgcagatagttggtttataatagcagtctgcacggcagtcatcgctgctaataatagagtcattcgttttatcacgggtgatgtttttttttgattagagagtgctttttcagttttatgaataatcgattcaatcggggcttgtgcctcgactaagggttcgactgttatgtctgtgtgcccgttcaataaatcacgaccaacttctaatgcgtaaagcctattttttaataaagtaaattgagccgaacccgctacaaacttcagctgactcttttggcaatttcgaatggtcgcttcaatcacttgaattgcatcaatgctttcctcggtcatttacctatcctcctaataaaaaaataaagccccgaaggactttattattaatcgttattaaaatgcttctgttaattgtggaaccacttgtttcttacgtgaaacaacaccggctaattgtgcacgatggttgttcaattttacgttgaaagctttttcaaaggcttctgctggttcaccgataacaagcgcttctgagttactgtttaagatgtcagtaatcaaaagtacgaataagtcgtaaccattagctttgttgtctgcttcgatagcagcttcaaaagcagcttggcgtttgaagaccgcttcgatatcaactgtattcacttgatcgatacgcacttttttaccagccatatcgaatgttttagcatccgcttcaattaattcagcttcgctcttatcatctaagttagtgcccgcttttaacatttcaagaccatatgattcgaaatcaatatcagcaatttcagccaatgtcttaatcgcaatccgatctttttcagttgttgtaggtgatttcatcaacaacgtatctgaaatgatagcactcatcattaaaccagctaattgagctggaatttcaactttgttttcgttgaacattgataataaaattgtgctggtacagccaactggttcagcgcggtagaataatgggctgactgtttcgaagtttgcaattcgatgatgatcaacaacgtgcgtcactgttaaatctttgatatcggcaacactttgttggctttcgttatgatcaaccaacatcacactgtcaacttcactgcttgcttctttaatgatgcgaggggttgctgctgcaaaatgacgcaatgcatagcttgtttcttcattaggttcacctagcgcaacggcttctacgtcgtttcctagttgttgttgaagataagcaaacgccattgccgcaacaattgcgtctgtatctgggttttggtgaccgaatactaattctttactcatatttatacagaccttccttttaaaaaaataacatcctaattataccaaaaatattagacgattctacggttttgctctctaatccgtgttaaataatctttttcttctaaataatggtcgaattcacggaaaaagctattaatccgtggaatatcttccttttccttgcggaagacaaaagctaattcgaactgaatggccggatcaaattgaaccgcgtttcccttaagtcccaaattatgtgcttcataaaaactctttggtaaagctgtacttaattcagttgcttcagcaaaacgcatgatttcaaatggtgatgtgaattgagccgcactcactggacgatcaaccaattgattcttataggcttcactgatgaattgatttaaatagtattcatctgggtatgtcacccatttattatctaatgtatctttaaaacggatcttcttacgcgtctttaaagcaggatcttggctgataaagagtaagcgttcatccacaatcttatgtgacttataaggtttccagttcttaatgctgtcatctggcaaatacataatggcaatatcaattttattattttcaagtcggtcccagatttctttccgagtcaataagtgcatgctgacttcgatgtcaggaaattgtttatagtattgaattaagaaggattggataacactgatttccatcgatgctaaaatcccaatattaatcttaccgcgcgtcgcactcgttgaactttgaatttcatccgtcgcagtatttaataaatcatgaatctgatgggtagcatccaacatcgtccgaccagcatccgaaatatgtaacttcttgccgactgaataaaataaaggcgcgccgactatccgttctaattttttaatctgttgggttaaagcaggttgcgtgataccgagtagttgtgccgcttgggtataattcatcgtttccgctaactgtaggaaataggttaatgttttagaggagaagatattttcttgtcttgttttcattttcaaatctccgttctttagtttacgcctatcattataataataaagatataaaaaaagagcaacccctttcgttgctcattcttattaaaggcttaaaattttcttatgttagcgttgctgctttggatagtctgctgtatgcaatagacgctccgcattgacaacgcgatcgtgggtcggtggttcaatccccgctaacggatatttaatccccatcttttcgtatttcacgattcccatcgtatggtagggcaacacttcgactcggtcaacattgtttaacgtttgaatataatcccctagacgagtgagatactcatcgtaatccgtccgttctggaatcaagacgtgccgaatccacatatgatgaccatgatttgacatatattcaatcatttccaaaatatgttcgttagaaaagccggttaactttttgtgccccgctggatcaatatgcttaatatcgaccattgaaagatcggtatatttcatcaattctttgaatttactaaagaagggttctttatacgtaaacggctgcccacaagtatccaaacaggtattaatcccttgtgccttacactttttaaataaatcaattaaaaaatcaatttgaattaaggattcaccaccgctacaggtaattccgccatctttaccccagaaggccttatatggcagtgcctttgcgattaattcgtctgcggtataagcttctccgctaccaatattccacgtatctggattatgacagaattcgcaacgcatgcgacagccttgtagaaaggcgacaaaccgaattccgggaccatccactgaaccaaatgtttcaatcgaatgaacatatccaattggcacctctggtgttatcggggtttctggaacaacattttcagttgataaccgtgttgtaaatttaattgccatttcactttcacctcttaaaagaaaagctatgctttctggtaaagtcgttaattcgcgttaacgaccttaccagaaagcggatattgctatccactttcgttagattacatttcgtcaaagaacgttcttgagataacgtcgtcttgttgttccttcgttaaatcagcgaagtagacacaataacctgaaacccgaaccgttaatgttgggtattcttctggatgttgttgtgcatccattaaggtttgcttattgaagacgttgatatttaaatgcatcccttgattaatcatgtaaccatcgaccatgttcacaagcgcgtctttacgtgcttcatcatcatgccctaatgtatttggtgtgacaccaaacgtatttgaaatcccatcagttgcataacggtatggaatcttcgcagttgaaagtaatgatgctaaagcaccattcttttcagcaccgtatgctgggttagcacctggtgagaatggttcgccagcttgacgaccatttggtgttgtcccagtattcttaccatacacaacatttgatgtgattgttaaaacagatgttgataattttgagccacgatataaatgatgcgtattcatcttcgtatagaaagtcttcactaaccatttagcgatatcgtcagcgcggtcgtcattgttcccataacgtggatagtctggattttgcgcttcgaaatcgactgccataccgtcttcatcacggataactttaacttggccgtatttaatcgctgagattgaatcaaccgcatgtgatagaccagaaataccagtcgcaaatgtccggtctaaacgactattcttcaatgccaattgtgctgattcatagtaatacttatcatgcatgtagtggatggtgtttaaagcattaacgtaaacgtctgctaaccaatctaacatcttatcgtatttacccatgaattctttgtaatcaatgatttcacttgtaattggttgataagctgggccgacttgagctttgcctaattcatcgatcccgccgttaattgcgtaaaggattgtcttagccaagttagcacgcgcaccaaaatattgaacgccgtctgcaattggttgtgcagaaacacagcatgcaatcccataatagtcactcccccattcattacgcatcaaatcatcgttttcgtattgaatcgttgaactcttaattgaaacttctgttgcatagcgcttgaaaccttctggtaagcgatctgaccaaagtaaggtgatattaggttctggagcagcacccatattttccaatgtcttcaagacacggaaggcagtcttagtgacatgatgacgaccatccataccaatcccacacattgataatgttgcccagattggatcacctgagaataatgaattataatcttctgtccgaatgaaacgaaccatccgtaacttcatgacaaaatggtcaaccatttcttgcgcttcagcttctgtaattaagccccgctctaaatcacgttggataaagatatccatcgttgtatcaatccggccaactgacatcgcagccccgttttgtgtcttaatagcggctaagtaaccgaagtaaatccattgaattgcttcttgggcattcttagcaggtcttgaaatatcaaagccatagctagcagccattttcttcatatcttgtaaagcacgatattgttcattgatttcttcacgaagacgaatgacatcgtctgtcatttcaccgtcgccaacaccattaaagtcacggactttttcttcagctaaacgatcaatcccatagactgcaatccgtggtaagtcaggaataatccgaccacgtgcataggcatctggaaggcccgtaataatcttgtagtgacgtgctttacgcatgtctggtgtataagcatcaaaaacaccttgattatgtgtcttgcggtattcgttaaaaatcttgtgttgttctggatcagtcttaaagccgtatgcttccaaggcatcttcggccatccgaatcccaccaaatggcatgaatgcgcgttttaatggggcatcagtttgtaatccaacaatcttttcaagatccttgtttaaataaccagggccgtgtgacgtaactgttgcaggattatcattgtctgcggctaaaacgccacctgcttcacgttcttgtttcttcaattccattagttgatcatttaacgttgttgttgcttcggttggaccagctaagaaactttcatcaccgtcataggcagtaaagttttgttggatgaaatcacgaatatcaatttcatcttgccagtcacctttgttaaagccgtcccaatagtcggctaagttaattttttcggtttttaccatgtggattacctccattagtcaagtgttgtttatcacagttttcacaattttagtataacacatcacatagtttatgcaagccctttctttttgattgtttagaaactcttaaactcttttgaaagattgatttatagctatttatctacttaaaatatttttataaccccaccatttaaattgtgcaaaacttattttgctgttatagtacaaaaccaaaaaatccgcatattatgtataacagaaaaaagcaagtcatcacatagatgacttgcttttttattattttgactcgtcttcatttttaactggaatagtcgtttgaacaaatgccggttgtccaacttcatcaacatccatcacaaaactaccgttcgaataacggtcggcagttgcatgttgataagggttaattgcaatcacttcttgctgatcagtatgaatcagtaactcgcttgcctgctcaacactaaccattgctgctacccgatgtggttctttcttcaattcacggagaattaagaccccacgacgcgcacgacttgttaaaccaacctcacttaagagcatccgtttaaaggcaccccgttgcgtcacaatggcaacggctgcatgtttatcttctggatgatataacgtaaagccgatgacaacatccccatctttgagatccattaatttgaccccactggccttagcacctgatacagagacttcagataaggtaaaactcaatccataacctttatagctagcactaaagacggctagcccttcatcacttggaatccagttcacgtttgtcacatgagcatctgcatgcaacttaataaagtcttgtgccttagaacgatatgttcgacttggcaagaggtcagagaaggcagtttgtttaatatagccatcatccgtcccaatcacaaagtagccagcctgttcatttggcttaaaggcaaatgctgcaataatcgcttcatcagccgccaaaccaatcgattgcgaaatatgttcgcccatttccttccatttcaaatcagcaatttcatgaactggtcgttgaattaaatgtccgtaattggtgaacatcatcaattgatctaaggtttgtagtggcttttgtaaaatggcaaaatcgccgtctttcaaaccgctgtcggccccttcagatgcttgatacgagcgcaaactactacgtttcaagtagccgtcatggctaactgcaaccatgacggtttcgtcaacaacagtcacacttgtatcaatttcaagcgtctcaatttgtgcttcaatttcagtttttcggtcactccgataagttttgaccattgcttttaactgcgccttaatcacccgtgcaagtgcttttggatcaccaagaatcatccggtattccttaatcgctgcatcaagttcagctgattcttgttccaaagcagtcacatcggtattcgttaaccggtataattgcagtgaaacaatcgcttcagcttgggcttctgtgaaggcgtagcttaccactaaattatctttagcgtcttttttattcttgctaccacgaatcgtcgcaatcacttgatctaaaatcgagagcgccttgattagccctgcgacaatgtgctgacgatccaatgccttttgtaaggtatattttgtccgccgaatcacgacttcttcttgatgttccaagtaggcatggaggatttctaataagccaacctgtttaggttgcatatgcgagatggcgaccatattaaagttatatgtgatttgcagatccgtatttttgaacagataattcaagatcccttgactatccgcttgctttttcaattcaacaacgactgataagcccatccgatcactttcatctcgtacttcagcaatcccatcgaccttctttaaaacgcgtaattcatcaatcttcttgaccatcatagccttgttgacttcataaggaatttcgctaatcacgatttgttcccgattgccgcgtaattgttggatgctggtttttgcccggacgacaactcgaccgcgaccagtttcataggctttcttaatcccatcgaccccttgtaagatcccaccagttgggaaatcaggtcctttgatgaaggtcatcattttttctaacgttgcatcgggatgatccaatagatagaccaagccatcagtcacttcacctaaattatgtggcggaatttcagtcgcgtacccagctgaaatcccagttgccccattcactaagaggtttgggaaccgagctggtaaaacagtgggttcttcagcggtatcatcgaagtttaaaacgaaatcaaccgtctttttatcgatgtccttgagcatttcaccagcaatcttacttaagcgtgcctcagtataccgcattgctgctggtggatccccatccattgacccattattcccatgcatttcaatcagtggttcacgtaatttccagtcctgacttaaccggaccatcgcttcataaattgaactatccccatgcggatggaaattccccatgacattcccgacagacttcgctgacttccggaaccctttatcataagtattcccatcgatggacattgcgtataaaattcgccgttgaacgggttttaacccatcgcgaatatctggtaacgcccgctcttgaatgatgtattttgaatagcggccaaagcggtcgcccatgacttcttcaagcgttagctcttgaattttttgtgcttcatcagccaaatttaatcactcacttttctattcgtctaattggtcaaataaatccacttcagcgcttgaagttgtcggtgctggttgaccattcgttgtatctaagatgctaccatcttcagccattgtgaacttaacgttttcttcaatccacttccgacgtggttcaactttatcgcccatcaacgttgtgacgcggcgttcagctaaggctgcatcatcaatccgcacccgaattaacgtccgactcgttggatccattgtggtatcccaaagttgatcagcattcatttcacccaaccctttgaaacgttgttgactgtagcctttacccatttctttagcgacgactttcaattcatcatcagtccaagcataggcaatcttcgtttttgccccagcacctttttggagcttatacaatggtggcaaggcaatgtagacttttccggcttcaattaacggccgcatatagcggtagaagaaggttaacaacaaaatttgaatatgggccccatcggtatccgcatcggtcatgatgatgactttatcgtaattgctgtcttcaactttgaattcagccccgactccggccccaatcgtgtaaatcatcgtgttgatttcttcattttttagaatttcttgtaatttcgctttttgggtatttaaaactttgccccgcaatggcaaaatcgcttggaatttccgatcgcgcccttgcttagcagaacccccagcagaatccccttcgaccaagtacaattcattcttcgccgcatttttcgattgcgctggtgttagcttcccagataataagccatcggatttcttctttttcttaccatttcgactttgttcacgtgctttacgcgcagcttcacgtgcttcgcgtgcttttaatgatttacgcactaaggcttgcgcaaattcaccattttcaagtaagaaaaagctcatttgttcataaaccaaactatcgacagctgtccgcgcttgtggcgagcctagcttacccttggtttgcccttcaaattgcaagagttcttctggaatccggacagacaagacggcactaagaccttcacgtacgtcggagccttccatgtttttatcccgttctttgagcaagtttaccttgcgggcgtaatcgttaaaagctttggttaagccggctttcatcccagcttcatgggtcccaccatcacctgtccggacattattcacaaatgacatgatgttttcggagtagccatcgttatattgacccgcaaattcgacttcaatgtcttctttggtgccttcgaaatataacttattaccaatcgtatctttatcttcgttcaaataatcgacaaatgattgaatcccttctgggtaatggaagacatcttcacgtgctggctcagcgcgtaaatcggtcaacgtaatcttgacatctttgagtaaaaaggcagattcgcgtaatcgttctgctaaggtattgtagttataagtagtcgtttgaaaaattgtcccatctggcttaaacgtaattaacgtgccgtttggttctttagctttgccaacttttttcaaggtaccaaccgggtggcccccattttcaaagcgttcttcgtaggcaacaccatcacgcacaacgcggacggtcaaccattcggataaggcattgacgacactcgcgccaaccccatgcaaaccgccggatgttttataactgttttgggtaaatttcccacctgcgtgaagcactgtcaaaataacttcaatcgtaggaatcccagattggtgcatcccagtcggcatcccacgaccatgatcacggacactaatactattatccgcgccaattacgacgttgatttctgaaccaaaaccagccaaggcttcatcgacagcgttatcgacaatttcgtacaccaaatggtgcaagccgcgaccgtcagttgagccaatgtacatgccaggccgttttcgaactgcttctagaccttctaagacctgaatcgaattatcattataatcttgtttttgatttggcattcaagtatgactcctttgtttaaaaatgaacagataaggtatattatcaacaagtttggatgattttacaatcaaaaatttaaaatttcttgccaatacaaatgtatgttcgtattcacctattctaacatacaatattccttttcccttgtcaaaatgctaaaataggggaaacaaatgccacaaataggagtttttgtcatgaaacttagtcttatctttattcttgcgtacctgatcggttcgttcccatcaggcgttattatcggccgcgttttctgtcacaaagatccccgagatgctggaagccataatatcggcacaactaactcgtatcgcgtgctcggcccaatcgctgggacagccgttttatttcttgatattttaaaaggcacacttgctgctagcctaccgatgatttttcacatccccaatcatgcattggtcttaatcgtcggcttagcggccgttgtcggtcatgcttactccatctttttacactttacggggggaaaagccgttgcaaccagcgcaggcatcttactggcatacaatccacttttcttcgtaattgccagtaccatctttatcagtgtcatcctgattacaagtatggttagcatggctagcatcctcggtccattgatgattgcgattttatcgttttacacgcatgattggctactcggttcgattgcgaccttggtcttacttttcctggtctaccggcaccgcgaaaatctacaacgcattaaaaatggcactgaaaacttagtgccatttggcctgtactatcgctataaacaaaaacatcaataactaaaaaaacgccgaacgggcgtttttttgtgcaatcagttaaagatcaatcaattgttcccgttcattgtaaaatgatcgataagctaagtaacacgcaatcactgaaccaagactcgttgccgataataacataaaggtcactaatatctggtacataatggccttgactggatcaattccggcaaaaatcaggcccgacatcatccctggcaggctgacaagccccatcgttttagcggaatcgatcgtgggtgacatccccgtacgaatactctcacgaacaatggcaattgatgcttgtttagcggtcgctcccaaggcgagtcgttccaaaacaggttgccgttcatccttaaattgcgccagtaagctgcggtaactcaagccaatggcgaccatcgagttggaagcaatcatcccagtaattggaataatttgcgatggaataaacttaatcgccccagataaaacaagtaatcctaacgtgaccccagtacttgttaaaattgcgataaatgaaattggaaacccgttgcgtagtttccccgcccgctttttggcatttgctgcggcgttaaaaataatgatcagcatcatcaataacgttagccacacatcgttaatatgaaaaatgaatttcagtaaataaccaacgataaataattgaatgattgcgcgaaaaacactgataatcatatctttttcaagaccgattttttcatggaagctaatgactaatgcgacaaacactaatgtcacagcaaacgtcagtgaaagaccattaacggctaagttcatcttgatttaccaattcgccagcaacaatttgcacctggcgccctttccgttgtaattcttctgtatcgtgggtaatggcaataattgtgagcccgcaatcctcattgaggtgctggacaaacgccaatacaattgccttattagcggcatctaaaccagtcgtaatttcatcaagtaataaaacttccggtggaaataaaacattacgaatcaaggcaattcgttgcttttcaccgcccgataacgtggtaatttttttcgttagtggcatgttggctaacccaaccgctgccaacgctttttcaattgctgccatatcgaccggtaaattacgaatctcgtatggaaaacgtaaattatccccgattgtttcaccaaataacgttgcttgttgaaaacaatacgaaaccttttgtcgatactgattgggactaaactgggtcagtggctgatcatttaataaaatggtgccacttgtcggcgttagtaagtccgcaattaaccgtaacaaggtactcttaccacccccagaaggtcctgtaatcgttaagtaactgcctttttcaacggttaaattaatgtcggttaaaatcacttgttgatcaacctgataagataatcgttcgatttttaattgaatcataagtccctcctgacaattatttaattcatagtatacacgaaattcacttaattagtgtcttctgctgattgaaaaaaggacacctaaaagcttatactaatattaggatatattaagtgatggacgttccgtccgctctggaaaagagatgttgataatgttaaatagctttccgcaagtcatgacaattgccggttccgattctgatggcagtgccggtgcgcaagcagatttaaatactttttttgcccgtaatgtttatggtatgagcattttgacagcctgtgttgctggaaattcatatgggattcgtgctagccaagcactgtctcccgactttattgatgccgagtttgaagcaattgcagccgactttcaggttcgcgcttgcaaaacaggaatgttaaccgaccgtgagaccattctaaccgttgctaatcagttgaaaaaacatgactttggtcccctagtgttagatccggtcattattaccaagcatgaagcattgttgttggcagatgatgcttttaacacactaaagacagaattaatgccccttgcaactgtcctaacgcctaatttctacgaagcgcaaaaattaactggtattgaactgaagacacctgctgatttccaagctgctggccaagcactattggcaatggacgcaaaaaacgtcatgattaaaggccatcacgaggccggacaatcaatcgttacagactacgtttgccttgccgatggacaagaattttggctatcagaaccttacgttgaaaccacccatattaatgggacgggcgattcactttcagcttgcatctgtgctgaaatcgctaagggacagacaattgaggctgccattaagaccgctaaacaatttgttcaccgcgccatcgctaacccgattgaagtcggccacaagtacggtccaattaaccaccatgcttaaaatacaaaaaagcccacggaaaaatccgtgggctttttgaatgtttagtgttctgcttcttcaatatcggcattgacttgttgtaagtcaaagtcactctttaaaaaagcttcgttatcacttgggaagtgctgttcaaacgtttcaaacggttggagcgtcatttgagcatcgaccacggtatagtctagaatatgaccgccaaagtcgtgcgtatcgtttaagaagtgtacgtgatagcctgcaacagctgcgccttgataaagcgctggtgcataatacccaatcaacgtgcccgttacgtctgtttgttcaaactccggttgcactcgggttgcagcagtcaaattcggataaggttcctgttgtgtttggacggcccgcgtatgcatgactttgaaagtcccagtcattttaaccgcaaaaaacaagttttttaacggtgcttgcgctagaatttgcgtttctaactcagcctttgtgcgttgatgaaccgcttgtgtaggtaatgatgaatcttgccaatgcactgtcgcaaatggaactgtcgcatcaggtgcgagttcagtcacttggccatccccattcacagtataagcatggccatctaataagaccagttcgccagctaaaccgtgcgccgtcccgattccaaaattcccatgggttaataattcagcaacggtcattgtccctgtaaagagccccggaattaatagggctaacgttccgtgttgataaacgcgtttgacatcatttgtcattgattttcctcctcaaattaaacgagttggtcaggtaataatgcttggcctaataattgattatctttgtaatcaacgggcacatctacaaggacgggaccatcaatggcaaaggcttgatccaatactttaccaagatctgcggctttttcgacccgtaacccggttgcaccaaaactctctgcatattggacaaaatcaacgggaccaaacttaacggccgctgattcgccatatttcatttcttcttggaattttaccatgtcataataaccgtcattccaaataatatgcacgatgtttaagttcagacgcaccgcagtttctaagtcttgacctgagaataagaagccaccatctcccgaaaccgacacaatttgtgtatttggccgcactagagcagcactgatcgcccatggcaatgccacacctaaggtctgcatcccgttactaaagagcaagtgccgtggttcgtaacttctaaaatgccgcgccatccagatgtaatgactaccaacatcgaccgtgacggtcatttcgtcggtgacccgtgcttgcagttctgaaataatgttcaacggatgactaagtggattatcggtcgtcatttcaggtgccgtgtcacgttgattgagttctgcgtgcaattcaactaaataatcacgcacatcgcccgctagttgataccccttcatataaggtaataaaaagtctagggtctgcgcaatatcgccgaccaattctttttcaggttggaaattatgatcgatttcagtgcgcatatcatcaatcaccataatgtgcgcatcactttcagcgttccagttacgcggttcatattcgattggatcatagccgactgcaataacaagatcactgcgttttagaatgcggtcacctggttgattccggaataaaccaactcgcccataaaaatcagtctctaaatcacgcgaaatgacaccggctgcttggaacgtttcaacgaccggaatgtgggtttcagccactaaattgcgaatcgctgctgtcacttctggtgaagaagcgcgcataccaactaaaagtactggtaattttgcttctttaatccgttgtgccaaaagcgtcgtttcaacgggactggctggccctaatttaggcgccattagcggtttaatcactttagaatgaacttctgagtccgtgacatcttgtgggatgctgacaaacgttgcgccctgtttagcggattcagcttcttgataggcgttagcaatcacttctgataaattctcaggttcttggacttccgcactgaattttgtgattggtgcgaataaagcggcattacgcatgctttgatgcgttagtcgcaacaaatcagcgcgtttcacttgaccggcaatggctaagactggatcaccttctgccgttgctgtcacgacccccgtcgctaaattactggcaccagggcctgaagtcgccattacaacgcctggtttgcccgtaatccgaccaatcccagccgccatgaaggctgcattttgttcatggcgcgtcaaaattaatttgggcgtctttggattaacgggatgttctagtcgttcaaaaacccgatcaatcttcgcacccggaatcccgaacacgtactcaacatcatgatttactaaactatcgatgatggcatccgcgccgtaatacttcttttcttcagtcatgacttaccctacctaacctatgattttataacttatatcttagcatggaactactggaaaaactagcagagtgcgtttagaatgcgttacccgcctacagccagtttactaaaaaaacgcactcaccatcttggtaagtgcgtttttttaatcattcattaacgaacagtaatttcataacttgcattaaacgtttcacctgcagccagttcgttgacaccaaatttttctgaaagttcaccgcttgcgtcaacggtatccgcaatcccccaccaaggttcaaggcacacaaggttgccttctgttggataaggtgaccaaacaccgatgaatggggcgccagccaatttcatggtcactgagtggtccgttttttcagaacgaatactgaattcattggcttgaccctttaattcgtagattaaggcgtcatttttaaataattggtgattgatatccgttgcgacgtcggttggtgctaacgtccggtcgttcaaattaatgaaggccccttgcaatgggatcttaacccgtgatttttgtgggcggtagtctaagaaataatcttcaaattgcgtgtcatccgttaatgggactttaaatcctggatgacccccaattgagaagtacattggcccgcttggcgcaacattgcggacgtcatagccaaccgtcaaatgcatatcatgaacacgatagctcacacgtaattcaaattcaaatggatacacggcccggctgtcagcgtctgctttcaacaagaaagtcacggcgtggtccgattgttcttcgatactgaattcgcgatcacgtgcaaaaccgtgttgacccatcggataggtttggccattatacgtatattggtctgcttttgaacgccccacgaatgggaataaaacgggtgcgtgccggccccaaacatcgggatcagcttgccataaatattcaagccccgaaacggcgcccttaatactttgtaattcggcgccttttggactgagggtcaccgttaaaaattcgtttgcaatttggatcatcttaaaataccaccttttaaaaattatagaataaagcgggttaaatctttatcggctgcaatattaccgatcttatcgttgacatattgttctgtgatggtgatatcccccatctgcatgtcaggaccttcaaagagaatatcctctaatagcttctctaagatggtggccaaacgacgcgcaccaatattatcggtatcatggttaacttggaaggcaatcgcagcaatgcggccaattgcttccatcgtgaaggtgacgtgcaccccatcggcgccaatcaacgccatgtattgttttacaagtgcgttgtttggttccgttaaaattcggatgaagtctttttcagttaaatcttcaagttcaacccggattgggaaccgtccttgtaattcagcgattaaatcgctgggttttgattcagcaaacgcccctgaaccgataaataagatatggtcggtcttcaaaacaccgtatttcgtattgacttgtgagccttcaacgattggtaaaatatcacgttgaaccccttcacgagagacttcaccagattgttttttgccaccagccgtaattttatcaatttcatcgataaaaataatcccggtattttcagcacgttggagcgcatcatggtaaatatcggcatggttgactaatttagcggattcttcttgaatgaaaacttcacgcgcttctttaaccgttaccgtccgcgtaatttttttcttcggcataattgaacccagagtatcgtttaaatcaattcccatctggcccatcatatcgttcattggggcaacttttttcggttcatcaacttgaatttcgatttcccggtcatctaacaagcctttatctaactgttctttaacagataaccgttcgttacggatatcatccgtcacttcttctggttcagtttgtccgaaaccagctggtgtttcccctttttgaagcgcgttaaacatgttcattaaatcattcatgttgttattgttcttacgttgttcctttttaatgcccggtactagtagtttaaccaagcgcttgtctgcttgacgagcagccttagcacgaacgtttttaaattgttctgtttcttccatatgcacagccacatcagctaagtcgcggaccattgattcaacgtcacgtcccacataccccacttcggtaaatttagtggcttcaaccttgataaatggggcatcgacaactttcgctaaccgtcgggcaatttctgttttcccgaccccagttggcccgatcattaatagatttttaggcgtgatttcttgttgcatttttgcactgagttgcatccggcgataacggttgtatagtgcaaccgcaacggcttttttagcttgatcttggccaatgacaaattgatcaagttcggcaacgattgttttgggtgttttattcattaagtccattgtgcgacctcctaaaatgattcgacaatcacgttgtggttggtgtaaacatcgattccaccagcaatatcaacactggttgtgacgattttttcaacggataagtcatcttttccttcaagtaataatgcggtagctgctgcttgggcgaaattgccgcctgaacccacggcaatcacttgatcacctgattccgatagcgtatcaggggtgatgacttcaccattccctgaaattaataaaatatcagtcgcattgaccgcaatcaacatcgcttctaatttttgaagcgttggatctttacgccagtcttgcgctaaagcaacagcagcatgttgcaggtcgcctgaatacttttctaatttttgttcaaaccattcttgtagcgtaaaggcatctgcaacaccaccagcaaagccgattgcgacttgattaccataaattcgacggacctttttagcagaatccttcgtcacaaatttttcgcccatggtgacttgaccgtcaccggcgatagctgttttaccattatgtttaactgcacaaattgttgtcatatgaattactcctaacgttgtttggggattgggcggggcttaatgtgcttttcaaactaactttctgcgcttagcgctgtgaatcaaatcagcgactttatcgctaattcgcttccctgtgctagtgctcaaaagttgaacaggcttgaaagcacttacttttttcttaacgtgctttcatcaactgctttctacgctttgctacatctgtcatatcaccggcgttgccggtaatccgcctgattaggcaaatgctcaaaaacaacccgttgatgacgcacttctttcttaacgtgcttttcaaaccatgttcttgcgtttagctacacaagtcaaacaattgcttccagtaatcattcgccttgttaggctaattctcagaacataaccggtttgaacgcacttctattttagcagtctttaagactgtgtgctaatattagtctatttttcgttgaaaaaaatcaaactttagtccgggttttacgcgcggggaaagaattggcggtaatctttttgtaaatgggctgtggtgacatgggtgtaaatctgtgtggttgataaactactgtggcctaataattcctgcaccgttcgcagatcagcaccgtgatccaataagtgagttgcaaaggtatgccgaatcatatgcggatgaatgtcactcgttaaacttgttttcttgataatctgatctaaaatgtattcaattccccgacttgtaattggcgctccgagatgattaacaaaaacgacatcgtggtccaattgttttttggccatcaattgaacacgaccaacttttaaataagcttgcaaggcacgttcagcatggtgcccgaatggtacatagcgatctttattgccctttccatgaacaagaatgacgcgtaagccgaaatcaatttgtgctaccgtcaactgcgcgcactcactcacccgcatccccgtcgcatacagtaattctaagatggcgcgattccgttgatcgagtggttgatccccatcaatggcagcaaatagcgcgtccatttccttttcgtaaaaaaaccgcggcagcttatgctgttgcttttttaattgaacagcttcaaaaggatcggtttgcacgaactcatttttcactaaataccggtaaaacgaccgcaaactcgaaattcgccgcgcgacagtttcacgactatattctttttgatccatttcattcaagtaagtctgcacgtccagtggcgtgacctgtttaaacgacgctaagccgccgttagcggttaaaaaagcactgaacatctgaatatcagcttgataagctttttgggtttctggcgagtaatgccgatcgaccactaagtactgtaaaaaaagattaagccattcttgttctaacgccaaaaaaatccctccaagcttgattagtattactttaccacaagcctggcgggatttaaaagattctaattaaagtgtcgtcttaaattggtcgatactttcaagtgcgcgatcagcaagtgcttggttccgttcctttttatcgcgaatccgttgtttcaaaggttcgaaaatcccaaagttcgcattcatcggttggaaatgtttggcactcgtatgggtaatatagtgcgccattgatcccatcgccgtatccgttgggaaaacagccggtgtttggtccaacgccagtttagcggcgttaatcccagccactagtccagaagcggcactttcaacgtagccttcaaccccagtcatttgaccagcgaagaatagatcgtcacgttgttttgattgataggttggtaataaaacatctggtgatttcatgaaagtattgcgatgcatcacaccataccgcacaaattcagcattttccaaaccaggaatcatgcggaaaacccgtttttgttcgccccacttcaaatgtgtttggaaaccaacaatgttgtacaaactagcagccgcattgtcttggcgcaattgcacaacggcgtatggttgtttgccagtattcggatcttccaatccaacgggtttcaaaggcccgaataacatcgtcttaatcccgcgtttggccatcacttcgattggcatacagccatcaaagaacttttcttcttcaaagtcatgcatttctgcaacttcagcgctaatcaaggctttgtagaagttttcgaattcttcttcagtcattggacagtttaagtaagcagcttcgcccttatcataccgtgatttgaggtaaactttatcgaaatcgatactgttcttatccaaaatgggcgctgcagcatcgtagaaatacaagccatcactgccgtttaaggcactgattttttcagctaagccttcggacgttaatggaccagtggccacaatcgtaggaccttctggaaaatcggttaattcttcatgatgaactgtgacacgttcatgattggctaagcgatccgtcaccgtttgtgaaaacggtgtgcggtcaacggccaatgcgccaccagcaggaacggcattttgatcagccgcactgatgattaatgagtccaagtgacgcatttcttctttaattaagccaaccgcattggtaatttggttcgcacggagcgaattcgtacacactaattctgcgaattgttctgtatggtgcgccggtgtcattttaacgggacgcatttcatagaggtgcacattcacaccgcgttgggcaatttgccatgctgcttctgaaccggctaatccggcaccaatcacgtttacaaaaggttctgtgctcatttgctagtctccatttttctaattatttttggacggtttcttcgtagtcaccgtttggacaaattacttgtttgccacctttaattttcttttcaacaaggtagtgttcacacttcggacagtttctgccgacgggtttatcccatgtgataaaatcacaatctgggtaacgatcacaaccgtagaataagcgattcttcttcgatttacgttcgatgacttgccccttaccacatttgggacaggtgacgccgatttccttcacgattgccttggtattgcgacaatctgggaagcgactgcaagcgaagaatttaccataacgacccattttaacaaccattggggcaccacagatgtcgcagtcaaagccagctggttcatctttaatttgtactttttcgatttgttcactcgctttttcgacttctttttcaaacggtttgaagaagttgtcaatcaccttgacccagtcttctttacccgtttcgacttcatccaaacgatgttccaaatcggccgtaaagtcgatgttaacgatgtccgggaagaattcgacaattaaaccattgacgatttcccctaactcagttggttcaaagcgttttgcgtttaacttcacgtaataacgccgttgaatcgtttcgatcgttggtgaatacgttgatggtcgaccaacaccgttttcttccaaagccttaactaaattggcttcagaataacgtgctggtggctgcgtaaaatgttgcgctggatcagttttaacgagtttcaccgcatccccaactgcaagttctggtaagacattatccttagcagagtcttcagtatcacgtgatgacacatagagtttcgtgaatcctgggaacttcatttgtgagccgtttgccttgaataagacatcaccttgagcaatcttaactgcgaccgtatcaaaaatggctggtgtcatctgactggcgacaaaccgtgaccagattaagttatagattttatattgatcgttagttaaaacgtctttcaagctcttaggtgtccgcatcactgacgttgggcgaatcgcttcatgggcatcttgtgcaccttcaggattcttcgtcttatgcgcctttaatgccgcatattcttcaccataattgtcatggatgaattgtgacgcttcatgtttagcaccggtagaaatccgggttgaatcggtacgcatataagtgattaacccgaccgtgccttctttgccaccaaggttaatcccttcatacaattgttgggcttgcatcattgttttccgcgttctgaagttcaacttacggttggcttcttgttgcaaggaactcgttgtaaatggtgcggctgcaaaacgtttgcgttcccgtttcttaacatcttcaatcgtgaaatccttagtcttatcgatttgtttcaaaatcgcttgaaccgcatcattatcgccaaggggtaatttcttacccttcacgccgtagaaactggcgttaaacttactgcgactctttttaaattccgcatccaatgaccagtattcttctggaacaaaggctttaatctcgttttcacgatcaatcacgagttttaacgcaacggattgaacccgaccagcactcaagccttttttaaccttttgccagagtaatggactgattgaatacccgacaatccgatcaagcacgcgtcgcgcttgttgtgcatcaacgagtttcatatcgatactacgtggatttttaaaagcacttttaacggtgtctttggtaatttcgttaaagacaacccggtttttttcagttggatcgagttttaaaatatgggaaacatgccatgcaatcgcttcgccttcgcgatccggatcggctgcgagatagatatgatcaacttttttagcttgcttttttaattctttaatcgtttcgcctttaccgcgaatcgagatatatttaggttcataattattttcaaaatcaacacccatttgactctttggtaaatcgcggatgtgacccttgcttgcaacaaccttatagttgcgcccaaggtacttttcaattgttttggcctttgcaggtgattctacaatgactaaatttttgcctgccatggacaaacccctttcaacagaacgctttgttcaaatcgttcattagcataaaacactaccttgacgattgtcaactgatagtatgcttgatattaacagcttaaagcatagcataggtttggcagtatgccaaagagaaattgttttcaaacgtacaaatcacaccaaaaatcggggttcaaccacttggtcgaaccccgatttcttctattatatagtcgccagataaaaaacttagactgacaaactatttttttgtgcatcgcgttcaagaatccccgcaataatttgatcaagggtgatggttgccatctccgcttccgcagctttttgcacctgatcataagccgcatcaagggttgcttgaatgttgctaccaattaaacaatctggatttgttttttcatcaacgtgtaataaccgttgatctgtatcaagcgcctgaaaaacagctaacattgtaatctgttccgctgggcgcgctaatttaggggcaatcgtccccggtttagtcgctaataaatccgccttcaccagtagtgacattagccgccgcactaaactaggattagactcgatgctcccagcaatcgcttggcttgataaatcaccatcttgaaaaatatcgacataggccaaaatatgaatggcatcactaagtttatgagaatatttcatgattcaaccgcctttttgaaatcaattcaggcttatttaataatcgtctgtaacgcttcttttaatgaaggtaatggtcggcctaagacatcgggtaaatcagaagtggtttcatctaaatcaccatcttgaatcattgtttgaataccagtgacaatttcagcgacttcagcaggtaagccgttgtcttcgaggctttgacgataatcagccgcatctaatgatactaccttaaattcttgattagtcaactcgctaatcgcttgagctaaatccgcataagtggctggcgcaccggcaaattcataaatcgcttttggttgatcgttgactaataccttagccgcagcttcagcatagtcgtgttcgagtgcccaaccaacatgcccttcaccagcgccataaacaaatggttgacctgctaatgcgcctttaatgctatccatttcgttttcaagataccagttattgcgtaagaatgtatgatcaatgcctgatgctgccaatgctttttcagtttgaatgtgatcacttgctaaagcacctgttgcttgatcagcgtgtgggaaactcgtataagcaatccacttaacgccagcctttttagcagcttcaatcacgtttaaatgttgttgcgcacggggcacatcgccaccaggttgtgaggagatgaataataaccggtcaacgcctttgagtgattccgttaatgtggcaacatcgttatagtcaccgggacgaacggtcacaccagctgggaccattttagtggctttttcagtattccgtgctaatccaatgatttgttctgctggcactaagtcagccaacgtcttcattgcgacttgcccaaaacgacctgtcactgctgtaattgcatatttcatattaaaaatcccctttgaattccatttgttactttataagtaacttgtgactttaatattaacaacatgccgcagaattgtcaacaattaaccctcaatcaaaataatgcaactcgtccaataacaattgttgatttaaaagcggcgttgcaccggctaaaatcagttgattacagcctgccgataatgaatgattaacctggcccggtaaggcatatacgttacgattggcttgtaatgctaaattagcggtgattaagctaccacttttttggcgggcttctgtgaccactaaactatgacaaagtccggcaataatccgatttcgggctgggaagtggtgcttcttagccgttacgtccaaaccgtattctgatatcaataaccctttttcagcgaccgcctgttgcaagtgttcgttttgtggtgggtaataacaattcaagcccgttccaatcacgccaatcggtcgtaaccctttttggagtgcaacttcatgcgccatcgcatccgccccttgagctaaaccactgataatcgtcgttgtttgtggtaatcccaataaatgctgcagggcttgcttagtatactccgtggcttgccgcgcaccaaccaccgcaacacatggctgtttcaaaacacttaaatcgccgcgataaaataaaactgttggcggacaatgggtttctaacaaccgttgcggataatctgcttctagaatcgtcagatactgaacataacgttcatgcgtggcacacttctgttgcagagctagactgtcaaaactagtctgaaaggtcagccaatatcgctccggtaaacacgcaatctgcgcaatctccaatgccgataaagcccaattgtgactcgttactaaccatgcggctaagcgtaattcactgatggggccaaacccatctgccaggtgtactttcaataataattgctttttagtcaacacaaaaaaacagctcctttacgtttatcttcgtaaaggagctgttttattttctatagggcgtctttaacgggcgaaaaactgcggcggtgaattggcgtaacaccgaattcagctaaaccagcgagatgtttcgctgtcccgtaacccatattattagcaagatcgtaacccggatactgttgatcataattaatcatcaattgatcccgaatcactttagccacaatactggctgaggcgatactaatactgcgcgcatcccccttaatcaatttttcttgtgggatgtctgtcggcacggtcattgcgtccaccaataggtaatcggggtgttctgctaaaccagcgacagcttcgcccatcgccagttccgtagcgtgatagatattctcttggtcgatccgtggtgcatcggcaatcccaatgctgacactgatggcttgtgccatgataccgcgatacagttcttgtttcaccttaaacgaaagctgtttagagtcgttgacttgccataggtcaaaatcatgtggcaaaatgacggccgctgtcacaactggacccgctaatgggccgcgcccaacttcatcaattccagcaatcaagggataatctggccataaactttcttctagctggcgtcgttcgataaacgccgctttttgcgccgctaacttagccatccgcttgtcatattgaacgagtaacttctgcacgccagcacgcgcatcactgcgtaagagcgccacttcttcctctgaaatgtcgtctaataagcgtgccttaatggcagcaattgattctggtttggtcattagtgcgcctccacaggaacgatatcgagtgtaaagcgccctaacttacccttacgcgcgtccgtgatgaatttcatacagaagcgatcgtagtcttctttaaaacctagtcgtttggtcaatgccatgattaaatcaggcgctggcatttcaagttcagccggcgtcacatggtattcttttaccaattgttgcggatagaaatccttgaaataatcgagggcatacaccacaacatcatccgggtgataaattgcatccgaaatcgcaccagttaaggccaacttattgccgacagctggatcttcgaatttaggccataaaacccctggtgtatctaacaattcgagtgattggcccgcttttaaccattgttgattcttggttacaccgggtcgattacctgttaccgcaatgtttttttgcaccaagcgattcaaaatcgttgatttaccaacgttaggaaccccaacacacattgcacggatcaccggattaagaatcccttttgcccgttttttagcaagtttgtctgccaaaatttcttgtgctactttttcgatttgcggtaattttgatttatgttgcgcatcaagcgcgattgctgtaatcccccgttttttaaatgtttcaatccattgttgtgtgcgtttggcatctgccatatccgctttgttcataatcaagagcgtcggtttgttttgaccaagttctgcaatcatcggattaatggaagattctggaacccgtgcatccacgatttcgagaatcaaatcgactgctttgagccgttctttaatttgtttttgggcctttgccatatggcctggataccattgaattgtcataataactcctttattgctagttaagcgatatacatcattcttaatatttgtcactgattgtattattcttaattctatcatacctgatgtctggctgacgggttaaatttaattccggactacaacatccaccaattaagcgtatcattttttcagttaagcatcatattcagtacatttcatacgatcattagcactcgataatcaaaaaagctgacacactctagagtatgtcagcttttaattattattttaaagattgtatatctttaatcggccagtagaccgccactgctcggcctaatattgtatcgcggtggatcgtaccaaacaaacggctatctttgctgatctgacgattgtcacccaatacaaagtactcatcttttggaatctgcttttcgccgattaaggtttttaattcaaaatctgatgttaaaatccctggtttctttttggcctgattcaagaatggttcgtcgacatgccgtccattgatgtacagctggtcattgcggtatgcaacggtttcacctggcagaccaatcacccgtttcacataagttgtttgatcagctcgggtgaagacaacaacatcaaagcgcttgatgggcccactagtgcgtaataagagttggtccgctgactcaagcgtcggggccatcgattgccctgacaccgatgcggggaccagaatgaacgaccgtaacacaatcgctaccgtcccagccagtaaaaatgcgagaagccaatagccggtaatggcccatccccgccacaatttctgcttcggggaagtcattaggcttgttcgctttcctgataggcttcatacgcctcatcaaaaatcgtcatactcgggaggtagctgccattaagttccaaatagcgcgttaatgtttcataatcgccgctttgtttagggaaagattggtcaaaaaaggcattgttggcaaattggggaactggttcataattattcggatcacgttgggtcatgaggtaacgataaaaactctgcttcatctgaacaccttatttcttattttttagcgggatatagacgtttaaatcaatcttatcattcttcaaatcgatatgtttagcagttacttgcatcccgttttcgagcttgaactcatttaggcgtaatgtaatccggctcttgtgtgcatccaaaataacccatttggggaatttgtattgacgcttgatgtaattaaagacaaacgacatgggcaccttcaattgtccgactgctaattgtttggcgcgtaattgtacgtcgccattttctaaaacgtacggttcaaaaaagaggttgaattcgaccggaaaccctaagaacttgaattgaccagataaaatcgcctgctgatccagggtgagttggtatttaatctttgaatcttccaagtagttttgtaaataataggtgactaaactattgatttgtctcttatgcatctgaatttcaaaagtgctatcagctttgatgattttctcagttttaatcatttcagtcttaggggctgtcacgttgtagccgacaagaccaactgtcccgatcacgactgctaataagacgatgaaactgtatttccaataattgatggtccgtttagttgttgttttctgtgctgcttgatgtgcttgtctggttgtcataacctatcctttctctaatcccacgtttgcttgtgtgctttcatcacttgccaaaaggcctttgtgacccattgataacctttatgattgggatggaaatgatcatctggactgatataggggttcaaatgctcgttagccgctaatgttttttgcaactgtgcactatccattttagcgagcgatttagtctgtttgacaaaatgcccatcgccccgtgtcaacatccgatcactattgacataatacgtatctttgaaatcattagcaaccgttttggcggtctgattccactcagcaaccgcctttgacatcccagtgatttcagggaaatagacataaaacggattgtagacccccatgatgaaaattggggcatcaggattatattttctaatttgcatcatcagcgtggttaaattcgcttgatatttttgctgaccagtcgtaatccgacgttgattcagctcaaaaaaattattctgtaaaactgccattaggtcgttgcccccaacagttagcgtcacaatatcagcttttgccaattgctgctgtagcggcttttgtttctgcacgcgtttagtaatctgtacactggtatcgcccgtcacaccgaaattggcggtcttgacgggatgcttggttgcttgctgaatctgattggcaactaatgacacatagccttctttgttggtctcatcaccaacaccatgcgtcaatgaatcgccaatcgcaaccaactgcaacgtcttttttggttttggttttgatttgatcactttatccgctgaagacgttgatgttaccgtcttaggcgcttggttgagccgtggcgttaatagttgccagataataaagaccactaaaatcgcaccagcaaataagcctaaatcaattaaaatctgtcgtgctttcttcaaacgtgacacctcggttatttctagataatagttaaggctgggacaattaaatgtcaaccagccttagtgtgttaatacattaattgtaatcttgttaatcctctgtgtagtacataacggcaaatgcgcctgcacccgcatgcgttgcaatcactggatcagttgtccggacaagaatttcgatgtttgggaatactacttgcaattgtgctttaattttttcgctcaattctagcccatccgcatgtgaaatcccgattgcccgaatctttaagtcgcgcatatcagcttccatttcatcgatgaatttcgtaatggtcttcatcccccggcctttgcgtaacacttttaattcgctatcagccacttcaaggatcaccttgatatttaataaacttgaaatcacaccagccgcatgactcaaccggccccccttaacgaggttggttagatcagtcacacccatgtataacttcgtatgatcgtgtacgttttgaatggctgctaaagcatcatccatgctaccgccgttttcaatgacttctgccgcttttaacacttggaatgccattgcacggtcggtaaagtcgctatcgacaactgttacatctgctttcgccatctcgccggcttggcgggctgtatcaacagtgccactaattgctcgtagcatgtgaattgataaaatctggctgccatcagccgctaattgttcatacgtttcgacaaaattcccgattgcgggttgactcgtcttaggtaaggcactcgcacttgccatttcagtcataaattgatcgcgggtaatggtttcaccatcgatatacaccgtattgtcaatcataatcgtcaacggaataaccgtaatatgatgttctttaatttcttcaggagtgagttggatggatgaatccgttacaattttaatattagccactattacttcagccacgctttctatcttgaaatctgggcaatcaacggccccgtgatttctatgattatgtctattgacagtatatcaaacaatcacgcttttttcaccaaaagttactgattaaaaaaaagccagttgtcacttttgtagcaagcaaaaaggcggttacatcgctgcgaccgcccttaattgaatctttctaacggcgttgatagatttcaaacgtatgcgcatagcgattacgttcgtccaccacaccaggtgtttgactgatcaattcgaactgatccatcgctaattttggcatataaacgttgccttcaaacgattcagcaatttttgtaacgtacagataatcgacatcatcggcgtacattgcaaaaatatcggcaccaccaatgataaaaatctttttcatcgggttggcttgctcatatttaagcagttccgccttggtgtgcatcacaaacaccccatcagccacagctaaatccggttgtcgcgtaatcacaatgttttggcgtccaggtaagggttggacgggtaaactatcatacgttttccggcccattaccaccacttcatgaaccgtttcgtgtttaaaattggcaagatcgttgggtaatgaccatggtaagtgaccattttgaccgattaacccattttgatcttcagcccataagaatgctaacattggcgctcctcctcattaaaccgcaacgggtgctttaattgcgggttctgcttcatagttttcaagtttaatatcggcgacatcaaaatcaaagatgcttgttttatctggattgagccacaattttggtgcggcatgaattgggcgttcaagctgtgtcttcacctgttcaatatgattactgtaaatatgggcatcacccaacgtatggatgaattcaccgacttcaaggccggtttcatgcgcaatcaaatgtgtcaataatgcgtagctcgcaatgttaaatggtacgccaaggaaaacatccccgctgcgttgatacaattggcacgataaccgtccgtcattaacgtagaactggaacatcgtatgacaaggcggcaacaccatacttggcacgtcttctggattccaagctgagacaattaagcgccgtgaatcgggattggttttaatttgttcaatcacgtttttaatctgatcgattgtgtccccagaacgggtttgccaagcacgccattgtttaccatagatatcgcccagttcaccatattgtttggcaaaggcttcatcgtctaaaatccgttcgttaaactgttgcatttggtcgcgataaacagtattgaaggccgcatcagtttgggcacgatgaccaaaatctgtcatatccgggcctgtgtaatcggcactttgaacgtaacgttcaaacgcccattcatcccaaatatgattattgtgttgtagtaagtaacgaatattggaatcaccttttaaaaaccacaataactcacttttaattaacccgaatggcacttttttggtggttaataaaggaaacccttcgtttaaatcaaagcgcatttgatagccaaacagactataggtgccagtgttggtacgatcttctttataatgacccgtttctaaaatggtacgtgctaaatctaagtaggtttgctcagacatgatgtggattcctttctttaacgtgcttttcaagctaactttctgcacttagcgacgtatgccaaataatcgactttgtcgcttattcgtcacactaagctaatgcttaaaagttgaacaagcttgaacgcacttcttttaacgtgctttttgaaactggcgcttgcgcttaacgacatttgtcaaatcagcgattacatcgctaattcgccaaattaagttaatgctcagcgtcaaaccgtttcaaacgcactcagttttttaacgtgcttttaaaaccatgttcttgcgtttagctacacaagtcaaacgattgctttcagcaatcattcgccttgttaggctagtgctcggaatatacccggtttgaacgcactcatttagtttgcgtattcacttaagtattcccagcgggtcattttttcgtctagttgttggttaagttgatccatttgggcctgccactctgctaatttaccatagtccgcgccgtttgcgttcatttctgctttgatggtttcaatctgttcgtccaattgttccatgtcggcttcgatgtgttcgtattccttttgttcggcgtatgttaatttctgcttggtctttgcaactggtgcttcttcaaccgatgctgtcgctgctttaggcgctgacttagttggtgttgctttttgttttgccaagtaatcgctgaacaggccaacttcggtgctaatcttgccggccccttcaaaaatcaagagtttgtcggcaacttgatcgaggaagtaacggtcatgcgaaactgtgatcacagtcccgttaaagttttccaagtaattttccagaatcgtcaacgtgccaatatctaaatcgttagttggttcatccagtaataagacgtttggttgttgcatcaaaattttcaacaagtacaagcggcgtttttcaccaccagaaagtttgccaatcaatgtgccgtgcatttgacggctgaataggaattgttctaacaattgtgtgacactgatccggtccccatttttaccaatgacttcttcgccggcttcttgcaagtatgcaatcactcgtttgttaggatctaagtcttcattttgttgcgtatagtagccgaggttgacggtttcgccgacaattaactcgccactatcaagtgggaggcgttcagccaacacgtttaacagtgatgatttaccggccccgttgacgccactaatcccaatccgatcattcgcttgaactagaatactaaagtcatccaaaatctgacgatcgccgagttttaaactggcgttctttaattcgagtacttttttacctaaccgcgattgccccatctgaatatcgacttccgaatcgtctggtccagtggttaaattcgcctttaagtcattgaagcgattaatccgcgcttgttgcttggttgttcgtgccttagcacccgcgcgcatccacgttaattcttgcttgtagagttgttgttgcttatgggcagcttgttgttcacgttccaagcgatcagctttttgggttaaaaattgttcatagttaccgttatatgaatagagttgaccaccgtcgagttcaaaaatttggttcgcaacacgatccaagaagtagcgatcatgcgtgacaattaaaagcgcgccttgatattgtgctaagcgtttttcaagccattcaatggaatcaaaatccaagtggttcgttggttcgtccaaaatcaataagtctgggctttcaattaaggcttgtgccaacccaacccgtttttgttggcccccagataatgtattaatcggttgatccaaatccgttagatgtaattgcgtcaaaatcgtcttgatatccgtatcaaccgtccaagcatcttgttgcgtcatttgcgcatcagcttgttcgtattgcgtctgtaacttcggattagtgggatcttgcgtatatgccgccaagacgcgttcatagttttgaatcgtcttgaaaaccggattatcgccggcaaaaatcgccgccataatacttaagttcgtatcaaagcttggtttctgggctaaataactcatcgcgtattggttaggcgtttcaacctgcccgctatcgtatgaatccgtgccggtaatcgcgttgagtaacgtcgttttcccggtcccattaatgccgactaaaccaatgcggtccccttcacggattaaaaatgaaatgtcttcaaaaagcgttttttcgccgtaagtcttcgttaaatgccttgctgtcaatgtttgcaatatagtcacctttttactttcgttaccatcaatcatagcgaataatcagacgactgacaatcaaaatgacaaaaagaatgtcgtaaactgtaaacaaataaaaaagcccctgacaacgatcaatattgtcaggagctaacgtttaaatttcagggtacatatctgcaattgtgtgttctgcatcaatcacaatgtacaaccgaccatttttttgtgagatttggctactttgataaatattatctaagccactattatctttattcttgaatgggaaataaatttgcattggtgcgcgatcttgatcatcttcaaagattaaatcgagtttttcgatgtcttgatacttcgttgcacgaccgaacatccccatttcaagagaaccggtgttgatgtcttcggacttcacatgatccgcttcaggtaagatttcggctttgaaactcttgcaagggtgaatctcttgcattgggccaccattaatgcgaccataactggtggtaacacggctaatccaaatatcatttaattctttgtggctgacggtccaagcgtcaccatttctaaaataaaatttcaattccttaaaaacatgttgtgtcatcaattgtcaccctttctgaatgtgcttacatggttattttaacacaccttctgagggaatggcttagttttgtgcagccgattgcaataattgggcttgatcgtttggtaattgatctaacaccacggctttttcgagttgcgccaacatttttcctagttgcggaccaggttgatacccattttgcattaagacttgtccattgatggcgagttccgccttttgcttgatttgcagtgccgcatactttgcttgccactgatcaactgcgactgattcgttggtcattaattgggcaacaattaacgtgatgtctaatacatgttgccccgcttgataaagggcccactgatcggctgattggtctagaatggctggcaataatcccaaacctgctttaaccgcatcgatcacatcgttagcactcttccagcgtttcaataatttgccggcggcggcgggggttttacccaataatgcattgactagtagccaagccgtatcttcatcatgaatctgttgcgctggtaatgccgctaatttggtcagtcccgctgcttcagtcgcgaacgctggacaatattgatacaacccggtttttaaaaaggtttgtaacccattttgccgctgaatcccttgtagcaacttcacaaattcgacatgaatgcgttccaccgcaattttcgttaatagttcagcatgtttggcaatcgcagtttgtgtttctggtgtaactgcaaagccgagttgactttcaaaacggacggcacgcatcatacggagtgcatcttcgtggaaacgttcgtcggctttgcccaccgctctgatttgttgcgcttttagatcggtcaggccatcgaataaatcaataatttcaccatcagcgcgcatcgcaagcgcattaatcgtgaaatcccgccgttgtaaatcttcggctaacgaccgcacaaacgtcactgaatcaggccgtctaaaatcttgatagccactttccgttctaaaagtggtcacttcatagccagtcccatgatcaagaatcatcacagtcccgtgctggattccggtatcgaccgttcgtttaaaaatttgcttcacttctgctggatacgccgacgttgcgatatcaacgtcgtgaatcggcaagcctaataaataatcgcggacactgccgccgacgaaataggcttcaaaacccgccgcttcaatttgttttaagattggtagggccgcttcaaattccggcgcaaaggtggttactttcatggctatccctcttatctaacaattaactgtttctgatgctatttatcataccacaatcaaggaccccacttcagccaccaaagtggttccaattgtttttaacccccattccgtgctatatttgagttatgtaaagggggcgttgacatgacgaaacaacatacttggcaaacgactagtcgtgatttagcggtgattgcgctgggctgtgcgatctacgcgtttgggctagtgaccatcaacattcaaaatcacctggctgaaggtggcttaaccgggattaccttgattttacggtattggttgcatatcgacccggcgtattcaacggctttgttaaatatcccgctaattattctaggctatcgttacctcggtaaacgcgcactcgcctacacgatttacggaacggcgatgatgtccgtttttctatggatttggcaacgtgtccccatcacaattgatttaaaccacgatattttaatcgccgctattctagccggtttatgtggtggcttcggcagtgggattatctaccgcttcggtggcacaactggtggcaccgacgtcattgcccgcattatcgaaaaagaaaaagggatgccaatgggccgctccctccttctttttgacgtcgtagtcttaacactctcactcagttacctcgatatcgaacatatgatgtataccttaattgcgtcttacgtcttctcccggattgtgaacttcacactcgagggtgcttacgccgccaaagggctactcgtaatcagtgaccacgcgcaagcaattgccgatgacattctggccgatatggaacgcggcgtgacgtttctacaggccacaggcgcttatgcccatcaagaccgaccaatgctgtactgtgtcgtcagtccaagtgaaatcgcctatcttaaacggttgattaaccaacatgacccgcacgcattcgtttccattattgatgtgcacgaagcactcggggaaggctttacgtacgactaatcaataaaaacgccagcgattaatcgccggcgtttttaagtgtctttatgataattcctgtccctcagttaactcaatttctttttcaacttcttcaaccgtcacaaaatttttttgattgcgcagaacaaagaaaatcccaattaaaatcattaagctcgcaaaataaaaagtccaatgcgctgaccatttctcagcgattttaccagcaacaaatggtgcgattgccccgccagtaaagcgaataaagctatacgccgatgatgcaacactgcgttcaatcgaatcattttccatcgcaaccgtcgttaacaacgtattcaccaagccttggaagaaaccagcaatgatgacgccaaaggccactaaggctggttgatctgcataaataccgatcaccattaagcagatcaagaaaaagcttaacccaaacaacaacgtcacaagggtattcgttttttgttccatccgtggtgcaatgaaaaccgatgcaatggctaacatcacgccccacccgaaaaagacaaaaccaacttgcaattcagttaacccaactaataagaatggtgcatacgctaaaatcgtgaaaaacccgaaattatacaataatgcaataatcccgattgaacgtaaacgatgattttttaacgcgacagcccctgcaaaaaaaggcgcccttttagcaggtttagcaatcggttctaatgaaaccatgatggtcaacgccgcaataaacatcaaaatggcgacaccataaaacggaaaacgccatgaaagactccctaagacgccacccacaagtggtccaacggccatcccaattcctaaagatccttcgtataacataatcgcttgttccgttttttcaggcatcacactgacaatcgcagtcaaagcggttgataggaacaaggcgttcccaaagccccaaccggcccgtagcgaaattaattgcgtaatggtctgtgaacgaccagctaacgccgcaaataaaacaataatgatcaaaccaatactaatcgttttttttcgcaccaattctagtggaaataaaccctgtaaatagcataataatccctgtgaccaacatataactcgtaaatagtaaggtcgtttgcgctggtgtggcatttaatttaaccgcaatcgtttttaaaatgggatcaactaaaccaatccccataaatgcaaccatacacgtaaatgcaacggcatacgccgagcgtagccctttattttgattctccagcaacatatcactctctttctctttatataaactacattagattgcaaaacatatcaatttttacattaaaatttgacataatatagtgacatgtttgttgactctaaatatggtatactgagcaataattaatcgattaaagggtgaaataatatgagtacgcttagctatattttattatgtatgttagttcgcaaaccgtgtagcggctacgaattaaagcagtacattaatttattttgggaagcacaccacagtcaaatctacacggcattaaataaactgcacgaacaaggctatgtcacggttaaaattgatcccgttcataaacaaaagaagatttatcatttaacagaagccggccaactcgtcgttactgactggtttcaagaagaaacgaatttacccacacaacgtgacgagtttttagcaaaagtttacgttatttcactgttcaatcaagaacaagcagctgacttactccaagatcgccgccatcattaccaaaaaattcaaaaacaataccaacataagatgcaagaatacaacctcataaccgatcccaccgaaaagcaaaaaaacttaggtcgttacctgattttgaaacggcgcttaatggtctgcgcaacagaattagaatggtgcgcgtgggcgcaggacattcttaaccgcaatcaaaaccaataaaaaagacagctaatgcacttaaaaatgcactagctgtcttttttatgctttagttaaacatttcccacaataaacacgagctaaattaactatcgttagcaggcaaagcatactaacggccattaaaaacggtccagcgagcaaagccgccattgagatgggtgcttggtacaaaatggttcgcccgacatgaatcgtcaggctccaaactaagcccccggctagtaggctgactgcaagacaaacaccaactaagatcactgcatgcaattgttgtgtcagcaatagttgctgttttgttaaaccgagcaactgtaattggcgcatttgctgggcattatcctcttttgcgactaacagcgtcgccaatacattcgctaatacaatcagtaacggcgcgcccaaatataaaccaattgtcaaaatgaaattcaccaaatgttcattgttggcactcgtggtatttgtataggccggtatattccacataattgccgacatccccgtaattaaaaccgcaatgaccgttactggcgtatacaacggcaaatatttttcagcagtataatcaatatcatgggctgccatgttcaaaaagagcgttctagcacctaaccaatagagcacgtggctaattaattttaataccgtgtgtccggtaagcgcaattagaattaataataagaacaacacgagattcaggttgccaaccgaattgccgagactgccaattgctttctcggaatgaccgacataggttaacgccatgctttgcatcgttagtttaataattaacccactgacgaccattaacgaaacaatcgtcctaactctacgaacgatccgccgtcggtgactgagatgcttattcccatcttttagttgatggcgtgcatgccaaaaaccaccactaccggcaattagactaaccaagacaaccgttaacaaaagtgccaagaacgaaaaatgaattggcatattcggcaacatttggggcccaacaatctgctgcaaccacgcataacaaaaacgcgttagtggcaaggcaacgactccgccgagcagagcactcaccccactgacaattccgatttaaatccccaaaatagcggccagtgcattgatcgttgcccctagaatcgcaagcattcgatagtccgttttaaactgatccaaaagctggtgcacgacttctttaatcacgattaccattgtaataccaccaaaaaataccggcatgataaaaatcggcaacggtgtattcggaccgtatagatcaacttgctgcgactgtgccacattcacaattcccgttaaacaaaaaccgaggattaaacccactgttacaaaaactggtattgttgctagccattgccgccaggaatgctttaactgtaaccaactgattgtccacatcgcttacaccacctgatccaaggcagcatagattgtcgcaagtgtcggttcagtcacaatttgctgaacctgaccgtcttttaatacaatcgcacgatctgtctgactagccagctcaatatcgtgggtcaccataatcaccgttctccctttagcaaccatctctttgaaatatgtaaaaataatcgctttggatgccgaatctagcgcacccgttggctcatcggcaaatagcacatcacaatcagttagaatcgtgcgagcaatcgcgactttttgttgctcaccacccgataaagtcgcaacaggcccatcgatttgtcccgcaaagttcattttggtcagtaactgtttaatctcagcacgttgcggttgctgatgactcaagcgctgttgtaagacaacattttcaaagacgggtaaagactgaatcaagttgtattgttgaaaaataaagccaatcgtctgtctgcgaaaagccgctagttgattgggtttcaattgatacggattaatccccgcaattgccacagtgccgcctgtaggtcgcgtaatccctgaaatacaatacaacaacgtactcttaccagacccagaaggcccaacaatactgaccaactcctctttttgcaccgtaaacgaaatatttttcaataaggttgtcgtctggtcagactgcccaattgacaccacttgtgttagttgggcaaccgaaagtattgtgtttgtcatcctaaaaacctccccaaataaatcctgttcccgattcctcttcaatgtaccactttcatctggggaagaaacgcgactaaagacgcaaaaaaacgctcgactaaagtaatagtcgggcgtttttttgcattattgcatggcttggtaatcgtcatagagagtttgcatctctaaatcgtttggcacgagcttcaaatattgtttgagggccgctaacatttctgggacctgtgccatttcttggaagaataaaattaaatcgtgtagaaagtccgagttatctttcaagtcaggataagctaacagataattttcgcgcgcttggtcaacatcatccaccgccatctgtgattgcgccaatgaccaatataaatcagccgttggtttatgattttcaatcgcatcttgtaagaaagcaatgttttcggcatggcggccttgacggcgataaacttggctcaaggcactaatttcgcccatattatcaggatcaatcttgagggcctcgtttagcatctgttcagcaacctcgttattgcctaattgaagcgctagatcgctccccttttgatagaggacctcgttgtaggcatcgtacccaattccggtctgaacggtcgttaaggcgtcttctaattgattctgagcctcttgagctgctgccaagtaagtatatagtgacgtatattgtggatcagtcgtctgtaacttggttaagatttcaattgctttttgataatccttaatttgtaagtacaaaaagcccatctggaattgatcgtcttctgttagaaattctggcgtcaacccttcgtaaatctgcaaagcttcttcaaaagccccactgctggcataactagttgccaaccgcttttgaatattcacctgtcccagttcaacaacgtcttggtcgattagcgtctcatagtaattggcggccttcacatattcacccatttcaaagtacaattcagctaatgcgaattgcatgacgggttcatctggatataagcgcaacgccgtcaataatttttgttcactaacttctggtaagcccattgtttgatagacatcagctgccgtcagcagactttcggcgtacgcattggattctggcgtaatatctgccaacaagttcaaggcgtcgtcgtattggccatcgctgaccgcaatatctgctagtgttgttctgatttgatcttcttcaggaaattgggccaacaattgttggtaaattgtcgttgcttgttccaaaaaacccatcgcatataactcttcagctaagctgtagagcgtatcgggttcatcagcaactaaggcttgttggaagtaagtctgtgcttgttctaaattattatcttctaatgctgtaagcatttgttctgaattcgtcatttaaccaccctttttcgattgttccattttaacatattcggattaattgccaataaaaaaagactgggaaaaatcccagcctataaattgaattcttatttaacagaatcctttaatgctttacctggcttgaatgcaggtactttgcttgcaggaatcttaatttctgcaccagtttgtgggttacggcccttacgagctgcacgttcacgtacttcaaaagtaccaaagccgattagttgaactttgtcaccttttttcaaagtgtcttggattgaaccaaatactgcatcaactgcagcagttgcatccttcttagttaaaccagtctttgatgctacgccttcgatcaattgtgctttgtttgccatgtttttcacctcctgctcatcacagataatcagtaattaattaccgaaaccatttttgagtggtcaaaaatgacgaaacaatgatttgatcaccatttcattttttaatttatcacacaaacctagtgatagcaaggaatttcgctaaaaaacagcattctgagcaaattagttaatcatattagcggatttttgaaaaaacagcttattttcgttgacgagggatcaaatggattggtgtaccagtaaagtcaaaggttttccgtaattgattcttcaagaaacgttgatatgagaaatgaagcaagttaacatcgtttacgaagaccacaaatgtaggcggttgaaccgctacttgtgtcatgtaataaatgcgcaatcgtttcccattaatagctggagttggtgtcaccgttgttgcgtccatcaagacttcgtttaagagtgctgattggatgcgccggttttggttttcactcacttgttcaatcatcgctggcaagttttgcaagcgaacgccggtcttagccgatacaaagatgattggcgcatagtctaagtattggaattgatcgcgcacgtgattttcgaactctttcatcgtgtggttgtcttttttaagtgtatcccacttattaaccacgatgataatcccacgaccagcttcatgtgcgtagccagccactttcttatcttgttcacgaataccttcttcagcattcaaaacgactaatacgacgtctgaacggtcaatcgcacgtaatgcacgcattacggcgtatttttcagtattttcgtagaccttaccccgtttacggatcccggcagtatcaatcatggtaaattcttgattatcttcagccgtgaacttcgtatcgatggcatcccgcgtagtcccttcaatttgagagacaattacccggtcttcttttaacatcgcgttcacaagtgatgacttcccaacattgggacggccaatcaaactaaacttgatgctatcgtcttcttcttcgtcatcttcagctgggaacttagcaacggcggcatctaaaagatcacctaacccttgaccatgagcccctgaaacggcgatgggttcgccaaagccaagactatagaaatcaaaaatatcttggcgttgttctggattatccgccttattaaccccaagtaagatcggtttgtcagcgcggtataaaatttgtgcaactcgctcatccgcatcagtaaccccttctcgtgcactcactaagaagataatcacgtctgcttcatcaattgcaatttctgcttgttgtttaatctgttccataaatggtgcgtcactaatttcaatcccaccggtatcgattaggctaaattcatgccctaaccattcacttgtggtataaatgcgatcacgcgtaacccctggcgtatcttcaacaatcgagatccgctcaccggcaatgcgattaaaaatcgtcgatttaccgacattaggtcgaccaacaatggcgataactggttttgtcattgtattcattcccttcgttgttcagtgtaccctgtctgagccaaactgacaaggtcactccgacaaagtccgctgaacttccgcttcctctgcgtcgtactaatcaatcaccgacataaacgtagggtctgggacaaaacctagttttgtcccagaccctacctttttgcatatgacttttaaaaaaattatttatcgtctaatgttttaccaagcatgtcgccgatactgaaacctgtttcttcttctggcatcacatagtcagaaggcgccacatcttcgtgttctgaatccttagcaccagcaggtttttcttgcaatgctttgattgataaacctaaacgttgttgttcaggatcaactgataagaccttgacttgaaccgtttggccttcttctaacacatcgtttggtgtggcgatatgttgatgtgagatttgcgaaatatgcactaaaccttcaaccccagggaagacttcaacaaaggcgccaaatgttgttaaacgtttaacgaccccttctaaagtactaccaactggtgctttatcagcgatatcatcccaaggaccaggttgcgtatctttaattgataatgagatccggcctttttcttggtctaagctcaagactttcacttgcactttttgaccaacttctaagacatcagaaggttggttaatgtgatcatatgaaatttcagaaacgtggactaagccgtcaacgccacctaaatcgatgaatgcgccaaagtttgtcaaacgagcaacttcaccttcaacaacatccccaggtaacattttttcaaaaactgcttgtaacttagcttgacgttcttgttccaataatgctttacgtgaaagaattaaacggttttcacttggttcaatttcaataatttgtaaggttaattcttggcctttaaagctgcttaaatcacgtacgaaacgatcagaaatcattgaagctggtacgaagccacggacaccagcatcgacgactaagccgcctttaaccacgtcgatgactttagctgtgattgtttcttgattagcaaatttttgttcaatttcagaccaaactttacgggcttctaagcgacgtttagataataagtagctcccgttttctttatcgttaccgattcttgaaatgaccactaaatctaattggtcgcctactttggcaacgtctgcgatgtcttcaataggttgacttgataattctttttgaggcacaaccccttcaacaccagttccttcgataccgacaatcacttgtcgatcttcaattgctaaaacttcacctttaacaacgtccccaattttgacttcgtggacactgtctaaagcagctgccattgcatcgctgctttgggtgttattcaaattagcttcactcatagctaaaatcctccttaacgactatctatacagttactattttagttgatatctattcggattaccagttattttatctcgttcaaagataaaattacatatttttctttacaattgctaatattgtgtcgaccacctcatcgattgttaactgagttgtatcaatttcaatggcgtcgtcagctttttttaagggtgaaatggcccgtgtactatctttttgatcacgtaattcaatctctgcttgtagcgttgctaaaggcgtcataatccccttagctgtattttcagcataacggcgtttagctcgttcttgggcacttgccaccataaaaattttaaccttcgcagcaggtaacaccgttgttccaatatcgcgtccatccatgacgacttgaccttgatctgcaatctgacgttgccgtgcaaccatctcagtgcgcacaccagctaaagctgatacttgtgagacattattcgtaatttcaggggttcgaatggctaatgtaatatcttcaccattcaagaagactttttgccctgcttggtcaggtttaaattggatatctgcttcttttaaagctgctaaaattcccgcttcatccccgaagtctaaccctaatttctgtgctaacacggttgatgcgcgatacatagcacccgtatcaacgtatacgaaccctaatttagtagccacaattttggcgaccgtacttttaccagatgatgctggtccatcaattgcaatttgcatgttctgcctcctgaaaaaatcattaaaaaaggctgggagtttccccaggccttttggtagtactgattatttaacttttagagctgtgcctggtgccacttgtgaattggctgttaacccagggtttaatgcaagtagttgatcgagtgttaaaccgttattaaccgctgcgcggtataaaccttcgccggctttcaacgtataagaaccacccgttgtttcgcttgaactgctactttcagttgttgtttcttcgctactactattttgagcgtctgcttgagcttggctttgactattagccttttcagcttcttctgcagcttgtttgctactttcaactgcttggctttcactagccgctttttcactttcagcctgtttagctttactttcgctggccgctttggtagcactttcgctagcagacttcgcttttttagcttctttcttagaagcactatcactatcagaagtattaacgacaatcttactagactcgactgggcggttagcccggctagaatgaatcgtataggcaataatcggaaatgcaatcattaaaacaagcaatacacctagaataatggcaaaatatgtatttcctttttccttactcttggaagcaacacgcgataaattcccgcgatcatcacgatcatcatcaaactggctttcccagggtttgtcttccgtctgattatctaattttttcttatcatctttgagcattgacggccctccctattggtattctttgatattgtaccatagacccttttaaaatacccagaaaatctctaaaacaattgcttcaaaataccgtcccaatggtctaacccgtctattttaggggatttatcatcagttaacgtttttaaattaaatttttctaaaaagaccgttgaatcctgttgaccacaacattgatcagcatgggcaacctgttggggttgctcgtcaaaatagttcacaataaattgccgccgacagccttgtaagtttaaataatcaaccattgtttgaagcgcaaaacgcttttctttttgccgattctgtaacagttcactaacggcctgttcatccatcccaatttgctgataccgccgtaataattcaaactcgttgccttggctttgtttaaataatgtcggttcttgatagaaacgccgaatcaatccagcttcaggaatcccaaatgacactaacgactgttgcagatacgtatcttgcggtgttgctaacaacattgcataggctggttggccatcgcgccctgcacgaccgacttcttgtagataactttcgatattttgcggtaaatgatagtgaatcacatagcgaatattggctttattaatccccattccaaatgcattcgttgcgcagattacgtccaactgcccttgcataaactgttgttgaataatgaagcgctcctgtggcgaaagcgctgcgtgataataggcaactcgcatcgctgtcttttgttgcaaaaaagccgcaatctcgacggtcttttgacgacttgaaaaataaataatcccgggcccctgactctcagttaccaattgttgcaaaaaggcgtgcttactcgcttcatccgcttgttgactcacccctaagtaaatattaggacgatcaaccgacgtaataatcctattggccgactgcaaatctagcttggctaaaatatcatgccgaacctgtgcatcagctgttgcagttagtgcgagcgttgcccccggatttaattggtgcttgatttgcgcaagcactaaataatccggccgaaaatcaatcccccattgtgaaatacagtgggcttcatcgatgaccaataaatcaatctggcattgttgtagtgcttgaatgaccgccggctggcttatcgtttcaggcgccataaacacgaaacgatactgtggcaattgtcgcaataacgcatgcttttgccgcggttccaaatttgaattaatcgcgactgcctttttttcaccttggtaattcaactgtgcgacctgatcttgcatcaatgcaattaaaggtgaaataatgacagtggtatggcccaaaagataggctggtaattgataacataatgattttcccgtcccggtcggcaaaaccgccaaagtcgcttggcccgccaagacagattgaatcacttctaattgtcctggcttaaatgtctcatagccaaaccgctcttttagcgttttataaatcagttcatccgtgctcattgggcgttcacctgcctttgaatttgataaagccgatactcaaagaaatctagaccggggagtgcggtttgtgcttcattatagctgagcgatggctgttcagtcatcaatctagctagtttttgtgtagttgcatcctttaagaattgttcaaacggaaaccgtgggagtaacatcgcggtttctaaaaggtgttctttaatcgttccgatcttaacccggcgctggcggctgatttgttcaacactcgccccttgttggatcaattgccaggtctgtaacgtactctgactcaattgcgtttcagcctgatccactaattcattcaatagcggataagtcgtttggtgcgccaataaaagccctaaaatttgagcaaaggcgtcgatggtccgcacacgaactgtcaaggatgtgctatctaaggcttgcgccagttgttggtggcttttgcccaagacttgatgtccgatcagttgatttgccacaagatcggcttgttgcggatctaactggtcaagtaattgcgccaattctagctggaattgactgctaaaattgatggttgccttatgccgcttaaaccaactgaccaccaacacgcggtccttcatactcgtttccaatggatagtactgcgtattttgatgatgatattccgacacaatttgaacggccaacataaaacgagcagtgaattggggtaagtgacccatctgtgggccttcatagtgcgtcggccaaactaattgcggctgccattcagcttgtttttgttgcccggtagcagtcaaccaaacataccgctcatcgatttcaatccaaccattttgctgaagtcgttttaattctgcttgaaattgtgcctgttctagattaggataaatttggagccattttaataatccatatgctaaaccggcatacagatttgaagtagttcgtttaccaattaaggtatagtagattgcttgataccgccttttctcaggcgccaacaagcatagtagatacgccattaacatcatcaattaagtcctttattgagaaagtgtgaatttaatgctctatagtcaagtcatcccggaacgctgtatcgcctgcggtctctgccagctaaaggcgcccgacttattcgattacgatcaagaagggatcgccttttttaaacccgatcataatcagggaacgacgccaattgaagatcctaaagaacgaattgcgtttaaaaccgcctacaccgcctgtccaactggtgcgattgtacgccaatcaacgccatttttatcgtagcatatttacgtcctataaaaaaggttgtgcccgcttggacacaaccttttttgctgccatttatttggcaattggtttttgcatatgttgttttagccatggtaaaatccgtaaatataaaacggcaaacaccaccgttacgagtgcacctttaattaaattaaacggtactaatccaaatagaatgtatttggtagtcgacattcctaagttcaaacccatcaatttaatatagagcggtaaaatgaaaagccagttagcaaatgacatgaagatcgtcatgctgacagcccccgcaacaccagcaattgcttgacctactaaaacgttcgattgacgcttgaataaataatagaatggtaacaagtagcagattgacgccaagacaccggcaaagtcgccgaccaaactcggtaagctagcaccggtcataatgaaatgaagcgtcgagcgaatcaatgcgacccccattcctccaattggtccgtaaacgaacgtccctaacaggacaatcacgtcactaaaatcaatttttaaaaacggaaatgcgagaataattggaaattcgaaaaacatgacgacaaatgaaattgcccctagcattgcgaccccaatcatcgtacgaacttttgaaacttgcattactaacaccctccagatgaggttgccttcgtcagcggacttagccaagtctgattgcatcaaaaaggtctgttaatcagggagattaacagaccttacttgcatacattcatacccaaataagccctatcttcttccatctagactttcactatcggtactggaatcacaccagttcagccaccacaagaatcaacattgtagcaggtcgcggacttttaccgccggtcgggaattacaccctgcccctgaagacgaaccattaatattttattcgaaataagcatagcaaatcaacgtgccaaaagcaactaattaatcatgccgtgataattttggtcgattcttatgctgtggtttttcatttagttcagcaatttttttgaattctgcgacttcgattggtttcaaagcacggtattcgccagaaactaacccatctaacgttaagaaaccatatgtttcccgtttcaactttgttacgggtaggccaaccgcagctagcatgttcttaacctgatgattcatcccttcgtgaatggtgatgcttacaatggcagtgttcttacgccgatcagttgaaattaccttgaccttggctggtgctgttttgcgtttttctaagacaattcctttacgcaattggcgcaacatatctgcagttggtaatcctgaaaccttcgcaatataagtcttgtcgactttatattttggatgcatcatcatgttggcaaaatcaccatcattcgttagtagtaataagccagatgtatcgtaatctaatcggccgattggataaacccgttcaacgatatcgccaaggtattcagtgacgacccggcgtttcttatcatctgtcactgctgaaatcacttggcgtggtttatacaagacataatagaccttgcgttcacgcgttaacggcacaccgtcaacttcaatatgatcgcttgtgctatccaccttgatacccatttccttcaccacttcaccatttaaggtgacgtgaccagttgcaattaaggtttctgctttccgtcttgaagctaccccagcatttgcaatcactttttgtaatcgttccatttattgttctcctttggacgtctcttccgacgtcgtatctgtttcatttaacgtttgttcaaattgacggtaatacaagtctgctgtaccaccttcactaccatcgacatcagcgtcaagtgccaattgttcaagtggtggtaattcatcgagcgattcaagaccaaagtaatctaagaaataggtgctcgttccatataaaattggccgaccaggcgcatccttacgccctttttcgctaattaattggcgggctaacaaggtttggatggccccactactttgaacacctcggacctcatcgacttcaatccgcgtgattggttggcgatagacaataattgccaatacctcaagagcggcctgactaatactagttgacaccggtccatcaaaataggtcttcaacaacgtcgcgtattcttttttggtgactaatttatagatatcttcggcttgaatcaggttcaaacccgattcagtgttgccgcggtaacgatttgccaatttttctaataactggcggactgccggttcatcgagatgaataagttgcgcaatttgcgcaagcgcaattccttcgtcccccgcgacatataataaactctcaatttcagcgagatgattcaactgaaatgccctccttcaaccgaaccatgattggtgcatcatagtcggcttgttcgcaaataatttttcgatccttcatcaattctagtacggctaaaaatgttgtgacgatttcatctcgatctgttttaacaacgaccaacgcttcaaaagcaactggttgagcggctaaatgacgcacaatccaactcattttatccgtaatcgaaatttcgtcattttggaccgttttgaagaccggttgtttagcttgggcttcgaccaacattttagaaactgcggccgctaaatcgcgtggcttaatcacgccgcgcgccagtgggaccactttttcagctggattactactagctggcttagcaaagagctgttggcgctccaattcgcgctcttgcaaaaccgttgcgaccttttggaaggcttggtacgccaatagttggtccactaattcctgccgtggatcgacgtattcttctgtttcttcttcaattaattcaggtgccttaggtaagagcaacttactcttaatcttcatcaacgtcgccgccattactaaataatcacctgcaacatctagtttcaatacttgcatttggtgcaagtaatcaagatattgcgcggtgatttcagcaatgggaatatcataaatatcaatcttagtttgcttaattaaatgtaataataaatcgagtggtccttcaaaatcagtcaagaccaacgttaattgttcagtcattggtcaatctagtccatttctgtattctgatgttgttcccatttagcaatcaatggcgcagtctctaacgaacccatcacgcgactttcaggataaagcgccgctaattcatccaacatggtgaaatagttctcgtcgctacgttccgaagggttcagtgaaatatggcgcactaaaatatagtccgcacccagttcaatccccacaacaccggcaaaatcgccggcttcattgcgccataaatataaattgcgttgctcatccgacgtatagagcgccaattcagcttgtacatgactgacttcttttaaatccggtacgaaggataaaaagcccatcgcaatcttttcataatcatttttatacttgaataacatgttgacctccattgatcaaacaaagttctaatagcattaactctaccatagtttataaagcgcgacaaatttaatttaatcgcgtggatgactccgttggtaaacttctgtcaaatgtttcttactaatatgcgtgtaaatttgagtcgttgaaatatctgaatgccccaataattcttgtacaattcgcagatctgcgccattttcaagtagcacagtggcaaacgaatgccgcaatgtatgtggggtcacgtctttttcaatcccagccgttttaacatgtgccttcaggttcttccaaatcccttggcgcgtcaacccgttaccatggaaattaacaaacaggtacgggttagcacgccccttcgttaattgattccggctacgatcgaggtattgattaatccaatcaaccgctacatcaccaatcggtataatccgttccttattccctttgccgagggtctgaattaagcccagtgataaatgcaaatcagccatctttagatgaatcagctcgctaactcgtaaccccgtcgcatataaaacctctagaatcgctcgatctcgtaatccaagtgcggtgctcgtatctggtgccgccaatagtcgctcaatctccgccgtcgataaaacagccggtagatgacggccttgtttgggcgaatcgatttggagcatcggattttgtttaatctgcttttcacgcgctaaatactgatagaatttacgtaacgttgaaatactccgtgtaatactactttgtgccttatgcgcatcagtttgttcttgcaagtagttcaaaattaaaaagcggtcttcagtaaaattggcaacctgctgacgttgtaaaaacgccgcaaactgttgtaaatcctgccgataactctggcgcgtattctccgaaagaccgcgttcaacttttaaataatgtaaataatcttgaattaaatcatccatgtgcttcctcttttacaactgcgtcacgtcaatttggcgactaggatccagttgattggctggtaacccattttgttggttaatctgttggcaacgtgcacaaatcccgtgaaatgttaaacgatgatctaacaccgtaaatgtgtaatcatcatatacctgttgttccacggcaggcaataaatccgtatgaatttcttcgattgccccacattgcagacacaacaggtgatggtggaaatgatggtcgtgatcagtctcacacaagtcatagtgggtcatcccatcttcaatgaaccgaactttattcaacacatgcagttccgtcaacatctcaagggtgcgatacacagtggccaacccaatttcagggaccacctctttagttgccataaaaatctgttcggcactcagatgcgcttgggcatggtccaaaatgaccgccaccgtcgcagagcgttgtgctgttaacttgtagccggccgcttgtagctgctcggatattcggtctaattgctcagctttatccatttagcaacttccttttcaatcattcaaaaaagcttagtcttgcttctcgtcatctgtaattggggcaatatcagcttgacctttttcagttaaactcgttaggccctctgcttgagtaattaagccatttttcattaaccggcctaatgcccgcttaaaactgcctttactaatcccaaagtaactcttaatcgcttctggatcgctccggtcagtgtatggcattgcgtaatcaggttgccgttttaagacagccataatcatttcagcatcgtcgccaatttcttcatatgcccgtggtttcaaactgacatttaaactaccttcaggtcgcacaccaatgacgcgccccttaacctgttgacccaaacgtggttctgcttcacgttcagaaggatgaatgaacccaatgtaaaagtcatccgttaaaataaacgtcccggctaacttcaaacggtagaccgtccccatcacgtcttggttcttcatttctggtttagcaccttttgaaattgatctgaagatgctttcgtcagctagttggccccacatccgccctttttgatcgacttcaatcgcaatcattaaacgatcacctggtttaggccataatttcgtaatggttggtaaaatatccagtgatacgacaatatccttatctggcaagccaatattgacgaaaacgcctaaatcacgccgcgtttcaaccacttcaccaaaggcataatggcccacgcgtgatttaggaataaacgttgataagatcaattcccgacttgagttttcataagcaaaaccagtcaccgtttcaccgattgtcaattcttgttctaaagtttctttttttaattcaaatgtcacgccgtctttttggacaaagaaggctgtttcattttcatctgttactaaggcagtaatgacttgcccgattaattcattcatagttaacctcttttattcttattaattaatgaattggtactaaattaaagaccgttaaaatggtataagtaatccccgctgcaattacggggccagccgcaatcccttttagaaaaacgacacccatgatggtcccaaaaaccaaggccactgtcatctcaggactagcggacaatagccccacacccttcgctgatagtacagcaactaacacgccacaaccaactgcaataaaacccgccggcgttttaaaggcattgattaagtctttgacaccaatttgccccgttgcaatcgggactaggatagcaaccgaaatcactgtcactccccaattaatgcctttggcttggatcacaggcagcaccttatttgaaatcgggaatacctttaatattaaaacaaccgcggtcgcaatgattaaagattgatttttcgctaacaatgcaacgattaaaatcgctactaaaaataaccaactttccatgtaaacctccaataaagtctccctactattgtaccgataaatgaacgacttgtcagtactttcagaaaagtaattcaagattcgcatttttaaaacaaaaaaagccccctcttttcagagggggcttcatttcatcattcaggaatgattaaagagcgtttgttgcaccgcggtaaacaatcccacgacgtgaatcaacagtcacaacttcgccatctttgatagcttctgttgcgtctttagcaccaacaacaactggaatacccatagcgataccaacaacagcagcatgtgatgttaaaccaccgttttcaacaacgatagcacttgatttttcgattgctggtaagtaatctttgtcagttgatttaacaactaagataccaccatcaattgctttttcagcagcttctttagcgtttgaagcgacaacagccttgccaacgattgtttcatcgccaacaccttggccttgtgttaattttgaaccaattaattggatcttcataacgtttgttgtgccacgttcgccaacaggaacaccagcagtgatcaagattaggtcgccttctttagcaaaaccatgttcttgagctgtttgtgtagctaagttgaacatatcatctgtattagcaggtttcttagcgataactgggtatacaccatagttaactgttaaaccacgacgtgtacgttcgtcgaatgtaacggctaagatgtcagcttgtggacggtatttagaaatcatacgtgctgttgagcctgattctgtagcagcaacgattgtcttgattcctaagttacgtgcagtgtgagcaacagcttggccaattgattctgtcaagttagtcttgctgtatgctttcaatgcgtatgcatcgcggtctgttaatgatttttctgttctttcatcaatgcgagccattgttgcaacagcttctactgggtagtcaccgttagcactttcacctgaaagcattgttgcgtcagtaccatcaataacagcgttagcaacgtcgttaacttcagcacgtgtaggacgtgggttttcttgcattgagtccaacatttgtgtagctgtgataactggtttgccaatagcgttacatttcttgatcaagttcttttgtacaaaaggaacattttcaaatggaatttcaacacccatgtcaccacgagcaatcattaaaccatctgaaactttcatgatatcgtcaatgttgtcgataccttcttgtgattcaatcttagggaagatttgaacatgttccatgtgtttttcttctaataattcacggatatctaaaacatcttgaggtttacgaacaaaacttgcagcgataaagttgatttcatgatctaaaccaaaacgaatgtcgctagcatctttttctgtgataccaggtaagttgattgaaacaccaggtgcgttaacacctttacgtgagccgaccataccgtcgttttgaacttcagtaacaagttctttgtttgcttcgtctttttcaataattttaagatccactaaaccatcatcgattaaaacgtgtccgccgacatgtgtgtcgtcgtatagacctgggtaagtaacagcgattttttcaggtgttccttcaagtgtatcgtccattgaaatacgtaccacttcaccagtgtgtaattcaaatttcttaccttgttgaacagttgtccggatttcagcaccctttgtatctaacatgataccaactgttttaccagttaatttttcagcttcgtgaaccatgttcatccggcttaaatgttcttcatgatcaccatgagagaagttaaagcggaatacattagcacctgcttcgattaattttgtgatagtttcaacattgttacttgcgggtccaagtgtacttacgattttggttttcttcataagtggaatctctccttttatgtctattttttaaaagacttttcagtcgttttaacaattttatatatggaacgatgaatctagtaagctaaatcttcgtttaaatcataaagatctaacattgcgtgatgcttgtgattgaacaagtctaacatatcatgtgcgataatttcgttcttttcaatcccaagtgcaacgccacctttgccttcaagcaataattcaactgcttttgagcccaaacgacttgctaacacacggtcactagctgttggtgccccaccacgaacaacgtgtcctaaaacagttgaacgtaagtggaaatcgccgtattcagaaagtttttctgagaattcatcagcgtgcatcacaccttcagccaatacaatgacagcgtgtttttgaccatgttcacgtgaagtacgtagcttatcagcaacggccttaacgtcgaaatcatgttcagggataataatgtcttgtgcgccaccggcaacaccagcccaaagcgcgatatcaccagcgccacgacccattacttccacaacgaaagttctttcgtgactagcagctgtatcacggatccggtcaattgattcgagcactgtgttcacagctgtatcgaaaccaattgtttgatctgtaaatggaatatcattatcaattgttcctggaagaccgattgcgttataaccatgttcagttaaacgaagtgcaccgtgataagaaccatcaccaccgatgacaactaaagcttcgataccaaacttcttgagttgttcaatacctttcaattgtccttcgacttgtgcaaattctggataacgtgctgagtacaagaatgtcccaccacgttgaatcttgtcaccaaccgtaattgggtccatcttgaagatatctccggcaactaaaccagcgtaaccataattgataccatagacttcaaggccttcatgcattgcttttcttgcaacggcacggatggcagcgttcataccaggtgcatccccaccacttgtcaaaatacctatgcgtttcatcttttcaccccaggcaaatattttacttaaaaaaccaattggtcttttaaagtcactaatatattatcacttttcagaaaataagtcttgtcttttgcgaagattttcgcaaagatagaccaatttctttattggtcaaacccttttaaaatcacatttcccgtccctaaaaggtttgtaagcgcggtcgttagtttttcgttgttcacaacccaatagcgctcgttcaatagaattgactgtttatcggccgcattgtacaagataactggcgttgttccgtgattttgttgtaacaattgatacatttgttgttgcgcttgactcgtcaacgccgtttgaacccgtaaataaagggtcgctttgggtagcgtcttttgtgcatcttgtgccaattgaatctgattagcaaccacttgtaaatcgcgacgttgttcaactttcccggtgataaaaacaacttgtcctgtttgtagccattcactgacccgttgataaacgccagtaaagagcgtcacactaatttcaccggttgcatcttgccccgttacaaacgccatttgatcgccttttttcgttcgaatcaccttaattcggcgaatgaatagcaccaaatggaccgtttgctcgggtgccaaatcactgatatcaggcacatggtagtgttggcgtacacaatcatatttttcgaccggatgtcccgaaacataggccccaagatattcggcttctttatccaatcgttcagtcaaggttaaattcggtacggcacgttctttcggtgctaaaacagcaaataaatcgacgttattccctgacaacttcacactatcaagcaggtcggctaagttggtcaacagcgcattccgattcggattaaactgatcgaaggcgccactataaatcaaggcttctaatgcctcttgcttgagaaacttaggatccatacgctgtaagaaggccagtaacgatttaaacggtccgttcgttgtccgttcttgaataatcgccgccacaaaatcgcgccgaacttttttaatgctgaacaaaccaaagataatccctgagtcggctaatctgaaataactttgactgcggttaatatcaggtggcagcactttaatttgacgtttcttagcttctgctaagtaagttttcgtttttgtcggattgttcaaaacggcatttaataaagctgcaaaaaaggctgctggctgatgaacttttaaataagccaaccagaaagcaattttactataagcaacagcatgtgaccggttaaatccataattggcaaaccgctcaatatagtcgtagactgtcgtagcagcagtttctgtgtgcccgcgttcgagtgcgccttgaataaattgcgtccggctagcatcaatcaccgccttcttctttttactcattgctcgccgcaataagtcggcttcgcctaagctaaagccccccatcttggacgcagcctgcataacttgttcttgatacactaagatcccatacgttggctctaaaatatcggctaacgacgcgtccggataagtgacaggttcttgcccgttcttacgagcgataaatacgtcgatgttttccatcggacctggtcgatacaacgcatttgtcgccacgacgtcttcaaaagaactcggtgccaaccgccgtaaaacattcttaatgccaagtgattcaaattggaaaataccattagtatcaccttgttggaataatgcaagtgttttaggatcatccaacggaattgagtgtgggtcaaacggctgtcccgtttgctgtccaacaagctttacaatattagcaagaatccctaaattacgtaatcctaaaaagtcaatcttcagtaggcccagttcttccacgttgcccattggcaattgtgtaagttcaatctcttcaccgccactttgtaatgcaaccgtatcagttaacggtgcttggcttaacacaatcccagccgcatgcgttgagtagtgtcgtggcagtccttcaagtttctgtgctgtctcgaatagtaatcgattttgagtggaatcggccaccaaatttttcaatggttgtgattgttgataagcttcttttaacgtgattttcagcatgtccggaattaccttagcccaatcattcatttcaaactgacttaagccaaacacacgccccacatcacgtaacgccattttagctgccagtgtgccaaatgtaataatttgcgccatatgattccgaccgtatttgtgatagacataggccagcacttcatcccgacgattatctgggatatccaaatcaatatctggcatattcgcccgattggggttcaaaaaacgttcaaacaacaattgatattgaatcggatcgacatcagtaatcattaaagcataggccaccaacgaccctgccgcagagcctcgccctgggcccgtcataatatgttgttcatgggcatgccgcatgacatcggcaacgattaagaaataatcggcaaagcccatctcgttgatcactcgcaattcatactgcaagcgttcttgatattcttgcggaatcgcttgatcggcaaaccgaacttgtaagccttgctgacttaactgttctagatatgccgttgccgactcttgatgcggtgtttcaaagcgtggtaattgggcccgcttaaaggtcaactcaacttgacagagttgggcaatcttatccgtattgtgcacggcctcgaccaactgcaatgcttcaaactcggccgtaatctgatcagcagcttgtaaataatagccgcctggcgttgtctgatcaccactatggagattaacttgcgtaccagctttaatatgttgtaagacttgcactgaaaaagcatcatctggttctagataacgaacatcacctaatgcaaccagcggaactccggtcgtctgactcaatgcaattaacctgctaagttggggggctgctgctcgcttggcactgattcctaagtacaagctccccggatcaactgccgcctggagttgcgtcaaatatgccgttgtttgctcctccgcttgcaaaagtaggcggactaattcgccatcttgagccggcgtgatcactactaaatggctgaaccactgtgtaatatcagcaaatgaaaccagatcagtttgagtcatcactttagaagaaagcttcaaaagattctgatagccaactaaatctttcgccaatacaattagcggaaaccgttcatcggtttgaagtaatccgccaatttcaagcgttaaacccaagattggatgtaagtcagctgccttggccgccttataaaaatcgactagcccataaatcacgttcttatccgtcagcgcaatactctgatagccgcgcgccttagcactttcaatcagtgcatcaattttagtggtactttccaagagcgtataggtactcttaacctgtagttgaacgaatggcaagcaacgccccttctttcttcgttaattcgattactcttagtataacaaattatttcaaatgattctctttggaaaacgtgttacaatatcatagaattgaatcaaagaaagaaggccaactatgaaatacgttatgaatctactttggacattgatttttgggtttgtcattggatttatcggttctaaactaacgaaaaccggctttaacattcaaacaactgttatcgtctcagttatttttgggcttttgctcaacttcttacctcttgtcttaccaaaagatccagctaaataaagcacaaaaaagggccgcaactttatgttgcggccctttttacgtttattttgtaatgtaaatatacaaatcacttgttgaaaaaccggtattgaacttcacaccatttgattcaatcgtcttcatcgcggtttgactaccttttttgtttttcttcgtataatcgctaaattcggacatcacttttttggaatcagcgcccgttgcttgcgcaatcaatgcaaaactggtcccaaaatctttcaatgccgctttatctttgagcgctttaacgggtgtaatgagcgtcatccccattacatcttgactatcaacagaaccgcgaatggtgacatgctttgttgcgacccattcagtcaccccatttttaggtgtggttggtagcaattgatccttttgtgtctgttgcacctgttgcattgctgcttgtacttcctgttgccgctgcttaagtgtcatcagatcagcaggtgcaagttggcctgctttggcagctgctgcttgtttttgcaattcctgcgctttggtttgatctgccttagataacgccatcccaattaaagcctggttgtattgcgcggcaatcttggcatattggccaactgatgtgcccgctgcaatcgttaccttcttttgaacggttttaccgtttgctttagcttgtaccgttactgtttgtttgttagtcgttgttggtacttgaatcacataagttccgtctttgaccgttgctttttggaaatgattatgattaatccggtattgtaaatcagcttttttggttgttgaaccttttacgactgccaccattccattttggcgataatttgttttagtcgttgttaatttggttgtcccacaaccagccaatagaccgattagccctaagctggtcactaaaccaacaattgtttttttcatattcgtcaccttttcattgaaatttaactcattgaaatcttagattaacccttttagaatcacaattcaagcgaaaacgacgaagtgtcacattttttaagaccaatcaaaaagagcgaccacttaacggccgctcttttaaaaacttattttaaatttgttttcttttcataacggttaaacatatataatgcaacaattgtgaagaagatagggccagcaactgaccagattgtttgacttaaattaccatcaattgctggttgaataatcgtaaagacgttcgcaaaaccaactgtgaacatgaccatgcagacacagaatttatagaaggtcttccctttataaattgtaaatggtttttcgatactttcatcctttttaaagccaaagtatgagtatgccacaaacatgtatggcaatgtcattgaaacgtttgtcatcgctgttaagatatcgaagaacttagcagcactcttaccaccaaaagcaacgaaggcaataatcacaattacaattgcagcttggaccttcattgcattgaccggcatattattactatttttcttagtaaatgacttaggccaaaaggcagcaggtgtcccttcgataattgtttttaatggtgagaaaataattgtaaagaaagccccactaagtgctaagaacattgaaagccccatgtaacgactgagccaaatcccaacttgaatagcagcatgttcacttaagtgcattgctaaccctaattggtaacccatgttgttcatggcaatataagcaacgttccccaaagtaacggttgcgtttgaaccggttgctttggcgaagccaccaccattggtaaagacgaagttccagttagtgaaagtccccatcataaagatcccaacagcatagccgacaacaatcacgacagcagaaatagctaacccttttggaaagttaaccttagcgttttcagtttcatctactaatccaccaacaacttcaagaccaccataagcgaagatcgcaaatacaacgaaactgaagacttgaatcatcgatgtatagctttgatttggtgattggaagaatgcatgggttgtaacaggttgtgccattacccctttatttaaaacaaggattaacaaaccacccaagaataaaatcacgttgattaacgtaatggctgaaccaccaatactggtgattctcttgattttatcaaggccttttgatgtgacaaaggtaatgacaatgatccaaataatagctaaaattcctaatgtttgcacaccatttgtcaaaccaaagattgaccattcttgtgttttatcaaccccgaaaaaggcgtttgataatggaatccaaatcccgttcccgacgttaaccatccagataatgtatgaagcaaaccacataaatgtgccgacaaaggcaaatttagcgttaacggatttctccatccaagagtaaatccccccccttgcttcaccaaaggccgctcccatttctccgagcataaatgcataaggaataaagaaggtaacagctgctaaaacataccaaaaaattgatgcatatcccatcaagtagaacgcacgtgggatattcgtaaatccaaagactgacgtaaagaccattagaataagcgcaccaagcgttaacttattcgtcttcttcttttctgccacctaaaacacctctttcatttttttcagacttaaccacaatgattaatcctctgaataaaaattagttaactaacatttgttaataaactaattagttacctttattttacggcgaaaatagaaagaggtaaacgaattcattatttttgtaattgaattatttgtgaatcttaattcaattctcattttctagtcaattacttattttttgctggcgttttttcttcaactggttctttcttcaaagtaatcccaattgcaatcttatataccacactctgacatgctaatttcagcaatgtttgttgggtttcagtgaccaatgtacctgctggatttttgccttggtcataggggctgtaatcctcatctaactgatgaatcgctgctaaaaacgttaagataaagtaatcataaagttgcttttcatttcggttaggtgtttccgctgtcatcaattgtttgatttcttcaatcgaaaaactcgttttcaatagtgcaataattaaaacttgagcaatttgcgattttgtataccgttttttaatcggtgctgccacaatttcttttttgacgtaattattaatcattgaagcggtgatttcatctaaatttaacgcgtttaggtattgattgatgtaactaaccacttgatccatatatagttccaaatcgggcaggtctgtccaacgtggtaagcgtacaatttgtaaacgatcgagcttttgtttcaagtgttcatttttcataattatcaatctccttttattcaatactcattataccaccatctagtatttaaaactaggaaactgcataaaaaaagagtttcttattcagaaactctcaatgacgattagtcgttagcttttggtgtaacaacttgttcgcctttatagaaaccttttggtgatacacggtgacttacacggtattcgccattagttgcatcgaattgtacgtttggtgtgttcaatttgatatgtccacgacgcatacgtttcttcgtctttgatgttcttcttgctggaactgccattattttcagactcctttatatcttagattcattaatgatataccgaactcggggaatttggcaaggattatctcaatcccattcaaattgattttaaatcatcacgtgtcccgctacttttgtccgcgacttctataatactatgtttatccgctaagagcaagtcaattacagaaaaacaattgattaacgactcttaatgacaccactttcaaagtggaatcgtccttaatcgtcactaacattctgtacatcatccctaataagtgtaccatacaaacatcaatctgacagtaataatccctgattgatgtccaaaaaaagcgccgcaaattaaatttgcagcgctttttcaatcgttagcgattttcaaaaactaactggttatcttttaagttaatttcaaccgtggttcctggtaacatatgcccggcaataatttctttagccaatggggtttcgatatggttcgtaataaaacgccgtaatggccgcgccccaaatgcaggatcgtaaccttcttctgccacccattgtttagcagcatctgaaatcgtcaatgtcaattcttgatctgacaaacggtctgatagatcatgaagcattttgaccacaatcgcttgaatatcgttcaagctcaatggtgtaaacataattgtatcatcaattcgattcaagaattctggcttgaatttcgtctgaattaaggcttgaacactttccttagccgtttgtgaaacttgaccttcttcatctacaccgtccagtaggatttcagaacccaagttagaagtcataatgatgattgtattcttaaagtcaaccgtccgtccttgtgaatctgtcaaacgaccgtcatccaacacttgtaataaaatgttaaagacatctggatgggctttttcaatttcatccaataacacaattgtgtatggattccgccgaactgcttcagttaattggccaccttcttcatagccaacatagcccggtgcggcaccgaccaatcgtgatacagaatatttttccatatattcactcatatcaatgcggaccatatgccgttcagaatcaaataaatcctcagctaaagcttttgctaattcggtcttcccaacccctgttggtcctaagaagaggaatgagccaagcggacggtctggattttgtaagccagcccgtgaacgtaatacagcatctgtcacagcattgacagcttgatcttgaccaattacccgttcatgcagaacatcggcaagacgcagtaatttttgtcgatcaccggcaactaatttggcgactggaatcccagtttgggaactaaccaccgttgcaatttcattttcagtaacggattcctgaaccatccagtcctctggcttttcagccttttcaaggtcggcaaggtcttcttctaattgtggaattgtgccgtgttgcaacttagcagccgtttctaaatcataatttccctgtgcttcttctaattgccgtttagcagcatcaatttccgcttttttatcattaatgcggttcaaatcttctttttcagtttcccaccgcatctttaaattattcgttgtttcgcgtaaatcagctaattgtttttgcgtctcagccaatcgtttttgcgaagcggcgtcggtttctttctttaacgcttcttcttcaatttcaagttgcattaattgccgcgttgcttgatccaattccgttggttgtgaattcatttcgacgttaatgttggcactggcttcatctactaagtcgattgccttatccggtaagaatcgatccgtaatgtagcgatttgacaacgtcgcagctgcgactaaggcattatcgtgaatccggacaccgtggaaaatttcaaaccgttccttcaaaccacgtaaaatactgatggtatcttcaacggatggttcttgaactagcactttttggaaacgccgttcaagcgccttatctttttcgatattttgccggtattcatccaacgttgtcgcaccaatcatgtgtaattcaccacgcgctaacattggtttcaagaggttcccagcatccatgctaccttcagtcttaccagcaccaacaatcgtgtgaatttcatcaatgaagaccagaatccgaccttcactcttcttaacttcctttaacacagctttaagtcgttcttcaaattcaccccggtatttggccccggcgattaaagtccccatatccagtgaaataattgtcttatcttttaaattatcgggcacatctttacggacgattcgttgcgctaatccttcaacaatcgccgttttcccgacaccaggttccccaattaaaacggggttattcttggttttccgtgacaaaatccgaataacatctcgaatttcttcgtcccggccaataactggatccattttgccagaacggaccgctttgattaaatccgttccgtatttttcaagcgcttggtaattatcttcttggtttttagatgtcacacgctcgcctcctcgtaaatcagtaatgactttctttaatttttgttcagtgacattttgtttctgtaaatattgaacgagtgcctggtatttcaaacccattaagcccaagatgaccgtctcagttgataaaaattcatcttggaattctgttttgtatttttcagcagcagttaatacttggtacaagttttgtgagatgttttgaccgtaattcgtttgaccttcaaccgttggaattgcgtcaatttcacgatcaatctccgcctcaagagcatcgatatctgcaccggcttcttggtaaatttgccgtcctagttgttgtggttggactaaatatttaaagaggtgtggaatatcaatttcagtttgatgacgcgtcatcgcgattttctgcgcttctgcaagtgcatcttggacagcttgtgtcatttgttctggattcatagacgtcattcctttttcagttattttttaaattaagtgtcagattattctgactaattctataatagtcaaaataggtcaaactttcaagtaattcgcttataaatcagacttaagacggagagctggtaggcgagttcttcctgaaaagtaacacaaaaaaagaggctaagacaaaatctgtctctgaagtgaacccccgatattggaccaaaatccaatatcgggggtttttatattgaccaaatattctaaaacattaaaaataaaagttgttcaggattatctaacgtcatccttaggttatgaattaatagcgagaaaatatggtattaagagtaactcactagttgtctcgtgggttcaacgtcataaggcctttggcccaaaaggactagatgtcctatcacccaaaaaaacatttgatggctcatttaagatgaatgttttaaaatggatgaaaacgaataaggtttcttatccgaaaaccgcacttcattttaatatctcaaacgtcgggaccatctggcaatggcaacatatttgggagactgagggtgctgatgccttatatcgtttcaaaggacggcaaacaattatgtcagctgataaacaatcaaaaaaacggcaacaaacagagttagaacgtcttagagaagaaaatgaattgctacaaatcgagaatgaatacctaaaaaaattaagagccttagtccaggaagaagaaaacaacaagcgcaagttatccaagagctaaggcttaaacacaaactagtaaaaattctaaaaatagttggtatggccaaaagtacgtatgaatacattattagtcatgaaccgaacggttcatctgaccaatctgttaaacaaaccatccaaataatcaagaagaatcatccagcgtacggttatcgtcgtgtaactggtgaattacatcgtatgaatatcttagtaaatcataaaaaagtacttgtcttaatgcgcgaactgcaattactatcaactgcatttaacaaacgtactcgtaaatataattcatatagaggcaatgttggcaccgttgctaagaacttgatcaaccgtcgtttcttcactgatcgtccttatcaaaaactagtaacagacgttactgaagttcgctgggaaccaagacaattgatgaacgcgcctatttcacatgtatttatgatttattctcagccatcaagttagtaaacaccctactgttgaatttactacaactgttttgaatcgagcagttaagaaaatccctaagaatttaaaataccggacaacagtcccctcagatcaaggatttcaataccagcatcaagattggactcatatcttgaaagaacatcgcatttttcaaagtatgtctcgcaaagcaacatgtttagataatgcagcaatggagagctttttccatattatgaaagccgaagctttctaccaaaaagaaaccgatacttatgaaacgctagtttcacaaatatcggtttggattgatgattataatttttcaagaattaaaacaaaactgggttgtaaaagtccgattgaatatcgaatttttacaacccagaaagctgcttaaagtttcgtccaatatttggggttcacttcactcaacctctttttctatgcattatgatgatcacttgtttgtgtgatttgattaattttcgcgtgtaattcatggacttcagcttccttatccgctaacgctttatcaaatgctttttgattctttattttttctgcttcaaccgctgctttaatttgagcagcttgattgtcgcgtaattcagtgacttctttggtcatttccttttgtgctttccgttggctcaacgtgctgccagtcgctgccaagaaggtaatgatggcgccaatcaataatgacaccaaaataacgatgattaatggccatttaacatgggtgaatccaaagttaatggcgactggttcaacgtttaaaacagcaaaaattacgacaattaatgctaggaccaatactgtaattaatcgaccttgttttttcataaaactgccccccccctacttcttattcaataagttaccggcaacatagtctccgatatgtggtgccagttgatagaattgtgcaccgatcgccatcaaccatggtgcattaatttcacgttttgcatacccgattgttttcacaatccgataagctagttgatcaggatctaaaacaacccaatcgaccgatttcaaataattaccggtcttatccgcaatatcaaagaaagctgtatcaatcggcccaggattaacggtagtcacttgaaccccaaatggttttaattctaagcgtagaccatttgaatagccaacaaccgcgaacttagttgccgaatagatggccgacttaggcgttgccatcttgcccgccattgaagcaatgttaatgatgtggccgctaccttgttcaatcatcatccgcccaaaagcgcgcgtcatgtacattaaacctagcacattaacccggaacatctgctccacaacggtcatggatgtgtcgaatgcattttcaaaacttccaaaaccagcagcattgactaacacatctggaatcccgacttcagtttgcacctgagccacaatggtttcaatcgctgctggatcactgacatcgaggacatatgcatacgccggctgtcctgaaagccggtgtgcttcttcgcgaaccgccgccaattcagcttctcgacgggccaaaacgacgataattgcccctttactagcggcttcataggcaatcgctcgtcctaaaccagacgagccgccggtaatcaccacaattttacggtttaaatctctcaatgctgctaatttagtcatctgtttactcctttcgaccatgaaacggaatgtcatagatatctaagtcactaactacttttgtgtttttaaaaatatcgcgggcatcattttgtaaatcacgcactgcttgcccgaggtaccgggcagaaatatgggtcaataataaccgcttcacatgcgcggcttttgcgacctttgctgcattaatgttagttgaatggaaatattgacgcgcaatcttttgttcttgcttaccaaaggtcccttcatgcactaatacatctgcattagccgctaagcgttcaattggtggacattggcgggtatccccaataatggtcacaatccgtcctttttgagcatgtccaatgtaatctttgccatcaatttggcgcccatcagcgagtgtaaccacttctccctttttaatctttgcgtatacaggaccagccggaacaccatctgcatgcagtttctcaacttgcagttcccccggatggtccttttcaataatccgaaaaccataactggcaatccgatgatccaatttagcacattcaacccggaaagtcgcatcatcaatcaaaacaccttcttcaggaagaatgacaaagttcaatggatacgttaaatgactttcagagatttttaaactcgtgcgcacgtattcttcagttcccttagggccgtaaatcgtaagtggttcgtcgccaccttggaaagatcggcttgataaaaagcctggtaacccgaataaatgatccccatgtaaatgtgtgagaaagatctttttaactttgcgcggttttaatgtcgtttttaagatttgatgttgcgttgcttcaccgacgtcaaacaaccacacttcatttcgttcatccaataatttcaatgcgacacttgtgacgtttcgttgtcgtgctggaactccagcgcctgttcctaaaaattctaattccatttagctcttccaatctgtctttaattcaacgctttattttgccgcgagggctttggtaataatggcggcatattcattgaccccagttgggttcggatgcaccttatcttggtagaaccagtcactgtgtttggcagcctgtgaataccaatcaatcaccgttaagtttggatactgtttagttgcatttttaagcgcctggttaacatcattttgccaaggacgcgttgggacaaacgcgttgagccaatagacttttcgcttagtcccaatggctgccataaattgcgccatctgttcttgcgtaaaggcgccatttgttcctagactgaccagtacagtatcgctaagggcttgtttttgatcataaccttttacaatttgaatactttgatagagttggcgcccaacagccgcatcaaccaacatattcgggaataacttctgtaaagcttgactaccgtcgagtaggacggaatcaccaattgcagtcaccgagatattctgggcccgttgaatcgtcacttgactcaagccatatttttcaaattcttggttgattggatgcttttgcgcagccgcctcagccgctttttcagcttttgaagttggaccatttgcttgtccagctttattctgggcttttgcttttttaatcaacgcatctttacgcttttggttagctttttgattttgcttaatattgaccgctaatgccgatttatgcgtatctggcgccggttggaatggcgcttgaaacgccccgactaacccgattaaaaagacaattgcgagtccagtcactcgaccaaccacccgattccaatgtggttggtgcataaattgcttcaattggtgccataactgcttgtacggatagtgtgctagtggctgttcaataaaccggtaggataattcggtcaatccgaaaataatcgccacttcaatcactggatataaaaccgggtgatcagcgatatttttgaagattgtttcaaagaaaatcatcaccggaaattgatacagataaatcccgtaactccgtttacctaaccagttaaagaccggattcgtcaataaccgattccaatcagcgcctggatgagcgacaactgccactaaaacacagactaaagcactaaacagaaatagtcccccgcgatagacaagactactctcggcattcaacttaaccattaaccaaaccaaactgaggacactcactaacccgatgccatcgaggacgaggcgttgtttaggcacaatcttttgcttaagggctgttgatggccaaacaaacgccagcgctgctcctagtaaaattgaaaagacccgcgtatccgttccataatacaaacgactagggtcagcattgggttggtacaaaatggccatccagattgctgaaacaacactgactgctagtaatacttgggcaatccgatttttattcttaagaccaataatcaaggccacaacgataaaaggccaaattagatagaactgcccttcaatcgatagtgtccacagatgggtaaacggcgactcattattggcaaaccgatcgaaatacgactgaccatgtccaatttgccaccagttataaacgtataaaatgttcgtgataataatttgattaagttgctgtaacatttcccgctgaaaaagcgtgatgtacgcgcccgttgcaaacagcatcgttatcagcccagggtacaatcgttttacccggcgtaagtaaaaactttttaaattaatccattgattttgttcccactcttgaaccaataaatcggtgattagataccccgaaaccaccatgaagattgggacccctaaataaccaccggtaaaagtatatggcatcagatggtataaaataacaccaatcacgccgattgcgcgtaaaccatcaaagccagtaatgtaacgactattctttaaacgcttcttgcccgccattttttcaacctactctacattctaataactgctattataacaatattttagtgatgtgcctacattaagccctgttattttatgcatcccatagaaaaaggaagcattcaaaaatgaatgtcttcctttcttgacgtgcctattattcgacaaattcaaacgtaaagttatcaattgccactaaatcaccatcatgtgcgccactttcgcgtaaggcttcgtcaatccccattgaacgtaattgacgggcaaaacgcatgacaccatcttgatgatccaagttactcatcttgaagagtttttcaaccttgtcaccagacacaataaacgtgccgtattcatcttgttcaatgatgaaagcaggtgcttccggttgatattgataaagtttttgcgtttgaacttcttcgacgtctcccattgggaattcagtcgtttcagctaataagtcagctgtcttgttcatcaatgattgcaccccttgatgcgtgatacttgaaatttcaaaaatctcatgtgtatcgccggcagctgctaatttttgtttaaactcggctaataattcagaagaacctggtaaatccatcttagtcgctacaatcacttgtggtcgttctaagatttttggatcataggtctctaattcgtgattaatttgttggtaatcttcaaatgggtcgcgacccgtttgatcgtccatttcgattaaatgcaagacaacccgtgttcgttcaacgtgccgtaagaattgaatccctaaaccaacaccgtctgaagccccttcgattaaccccggtaaatcggctaagacaaagtcccgaccgtcatcgagttgcaccatccctaagttagggaccaacgttgtaaattggtaactagcaatcttaggtttcgcacttgtcaccactgacaacaacgttgatttcccaacagatgggaaaccaaccaacccaacatcagcaagcacttttaattcaagttgaatgctgcgttcttcaccaggttcaccgttttcggcaacttccggcgcactattacgggcatttgcgaaatgcatattcccacgaccaccacgaccgcccttagcaatcactaattgttggccatcttcggttaaatcaccgagtaattcattggtttcagcatcgcgcaccgttgtaccaggtggcacttgaacaaatgtatcctcggcaccgcggccgtacatttgtttattctgaccattaccaccactattggctttaaagtgatgacggtaacgaaagtccattaatgttcgtagaccttcatctaccactaaaatgacacttccgccccgaccaccatcgccaccggctggtccgccaagtggcacaaacttttcacggcgaaatgcaactgcaccatcgccgcctttaccagctttcacatcaattttgacttgatctacaaacatattttgactccttctcatcgttaaacagtaccttatatactaccgaaaaaaagattaaaagtaaacagataactggttaaacactgaattggctatatcatcgataaaaagcgcactgagtgagtgacctcaatcagtacgctttttattcgttaattaatggctagctggcaccaatttaaattggctccatggtttcaaatagtctaataggaataattctgtaggcgtaatacggccaaccacattcacgcgcccgtcatttggcatggctctgagggcaatttgggtttcccctttatactgaccgtaaccgacgttatcgattaaaatatcaccgtgttggatgtcaactgtatggtgggctgggaaaggcaggtctttaaaaatgacccgtgtcatcgttgaccgtagaagatattctgaacgatcgccacgataactatgcagactttcaaagaggaccttgcgttcatcagccgtaatgtcatctgcgacgtcgattgcgattgctgggaattcagcgttaaagacgtcatgcatcgtcttcaattctgcttccgaagcatacgcattaccgacaataatgtcatcaatgttatccattaaaacgtaatgtttcatctgcgttgccatcgttaaatcgcgatcaacttccatcgtgggcaacccatcttgtgttggccatggtccgaaagtcgcttcatgtgaattgacaaacgctgctgtattcaaattgtattttgcaaattgcgccgtacattgtttgaagaagtcttcacctaatcccgagaaccgatgtggatagaagttatgacaacctaacaagttttctcgtttgggtgaataactcataatgttatcaacgtaacttgtcccttgactcatattaatttcaatttttaaattaaacggattgcgcgtcatttccgcttcttcttggccggtaaaaccgttgtccaaccgaattccccaagcaccaagttcatggaaaaaacttaaattatcatatgaaataccgagttgcttgaacaaacccggattgatatcaatcatgacttgcattcctaattggttggcatgggctacaacccgtttaaagttgcctaacacggcttcttgatcgccagacacctccaataatgatgtaaagacgcgttggaacccatattgatgcgctaaatctaagtaagccgcatccttttcaaaagttgatcgttctggataaattgaaacgcctagttttcccatgaatagaacctcctaataattgggctataccaccctgtcatctattagtctagcataccttaagcacttttgaaaactcttacattacttttaaactggtctatttctggcattgttcgcagtttgctcactaacgcaccaatctttttttcggtctatatcagcgttttgatggtttttgaacgtttttgaaatatttcgattgcttttgaatggaaacgatgtcataatgatgctacggaggttttgtcatgttaacagaagaacgtcaccaagcgatattacaacttttaaagcaacaagacgtcgttaagatgcaatctttgtgccagttattgaacgcttctgaatcaactgtccgtcgtgacttgcaattgctcgaagaacaagggcttgctactcgaattcacggtggtgctaagcgcatcaacacgttacaagaagaacttggccagattgaaaaaaacggcaagaacgttcatgaaaaaaacgcgattgctaagtttgccgcagcacaaatccaacaaggctgcgtcatttacttagatgccggcacaacgacccaggcaatcatcccctacttaaggcctgaaatgaatttgacggtcgtcaccaatggggttgataccgcttctctcttagccgatcaccaaattcaaacctttctattaggtgggcgtgttaagagcaaaaccaaagcgatggtcggtgcggctgctttagaaacccttttgcaattccaattcaatcaggcgattcttggcacaaacggtatcgatgttgaagctgggctaaccacccctgatccagaagaagccactctaaagcgctttgcgattcaacaagcgaaccaaacgatggttttggcggatcacacaaaattcgacgctgtttcgttcagtaagtttgccccattggcacaagtccaattgattactgatcaattgtcaccatctgtttacaaacactatcattcacacacagaaatccaggaggttttatcttgatttatacgattacggcgaatccatcaatcgattacgtcattcaacttgaaaaactaaataccggtaacgtgaaccgcgtccaatctgacgttaagctccccggtggtaaagggattaacgtttcacgcatccttgccgaattagcattaccaagcgttgccctcggctttgtcggtggcttcactggtcaattcattcaaagcaaactcaacaacgcttcgatcgactgtcgattcactgaagtcgaagaagacacccggattaacgtgaagttaaaagacaatactgaagaaactgaaattaacggtcaaggcccacacatttcagcagaagccgttgccaacttgaaacaacaactgactaagctggaagccggcgatattgtcttcatgtctgggagtttgccacctaatttaccggctagtttctacaaagacttaatcccattgattcaagcgcacaacgctgaatttgtaattgatacaaccggtcaagctttgttagacacattggctgaaaaaccattggtcatcaaacccaaccatcacgaattggccgaactgttcgacacacactttgccaaccaaagtgaaatcatcgccgctggtcgcaaattattagaccaaggtgcccaacatgtcttggtctcaatggccggtgacggcgcccttttaatcacaccagaccacgcttacctcggtagtacacctaaagggacagtgattaattccgttggggctggtgattcaatgatcgccggttttgtcggcacattcgcacaacatcacgatgcactcgccgcttttaaaacaagtcttgcttgtggtagtgccaccgccttttctgaagatttagccactagcgctaagattaacgaactcttacctcaaattgaaatcacacaagttgattaattttaaatacaaaggagatttattatgaacatccaagatttactcttaaaagatgcgatgatcatggatttacaagcaacgactaaagaagccgctgttgatgaaatggttgcccgctataaagacatcggtgttatcacagatgacgccctctatcgtaaagatattttggctcgtgaagctcaatcatcaactggaattggcgaagggattgcaatgccccatgcaaaagacagtgccgttcaacgcgcaactgtgctattcgctaaaagtcaaaacggtgttgaatatgacgcactagacggccaacccgtttacttgttcttcatgattgccgctccagaaggcgctaacgatacgcatttacaagccttggctggtctttcatcccttttaatcaacccacaattagtcgctgatttgaaacaagcccaaacaccagaagacgtgcaaacgctctttgctaaggctcaagctgctaaagacgcagaagatgcgaaggaagaagctgaagaagccgctaaagcacaagccgcagccgcaacgccagctgatgatcaaaaaccattcatcgttgctgtcacagcctgcccaactgggattgcccacacttacatggccgaagctgccttgaaagaaacagctgctaaaatgggcatcgacattaaagttgaaacaaacggttctgaaggcgttaaacaccaattaaccgctgacgatattaaccgcgcaacaggggttatcatcgctgccgacaagaaagtcgatatgcctcgttttgatggtaaacatctcttgaaccgtcccgtgatcgacggcatcaagaaaccagctgaattgattcaaaaaacattggatgaagaaggctcaatctatcacgcaactgaaagccaatcaagcgaagaagcttcagctgacaagaaaaccctttggagtcgcatctaccaagatttaatgaatggtgtttcaaacatgttaccattcgttgtcggtggtgggatcttgatggccatctcattccttttggaacaaaccgttggcgcacattcaaccacttttattttcttgaactcattaggcaataatgcctttaacttcttaattccggtccttgctgcttacatcgcgatttcaatcggtgatcggcctgccttaatgcccggatttgtcgggggctacatggctagccaagcaacagccagtgtccttgcttcaaagagtccagccggattccttggcggtttagctgctgggttcatcgctggttgggtgatcgttggtttgaagaaagtcttcaagaacttgccacaaacccttgatggtttaaaaccaatcttaatattccctgtattaggactattgattgttggctttattatgtacttcatgatcaacccagtctttgctcaaattaacctctggttgagtaccttcttaacacacttaggggctggtaacgcattactacttggtgcgattttaggtggcatgatggccgttgatatgggcggtcctttcaacaaggctgcttataccttcgcaatcggtgtcttcacaaccaccaaagatggttcattgatggccgctgtcatggctggtgggatggtcccaccattggcaatcgcggttgctgctactattttcaaaaacaaatttaccggtagtgaacggaaacaagccttcgcaaactatgtattagggatttcattcattactgaaggtgccattccatttgctgcatcagatccgttacacgtgattgtttcaagtgttatcggttcagcaatcggtggtggtttaacccaattatggcaaatcactgtccctgcaccacatggtgggatcttcgtggcaccacttgccaaccacggcctactctttgtgcttgccgtgttaatcggaacatttgtcagtgccctaatcttaggcctctggcgtccagtggcaaaagaagcttaatttaaaaagtcgtagtcaaatgactgcgactttttatttatcttgaaaatcagtattgtgcttttgtttccattcattaatgtaattcaaacgttgtttcatccgcgtttcattgccttgttcggtcggccggtaataaatatggtcggcgatactctctggtctagttggcatcgtggtcaatctatcatcgtagaaatgtgcgagttgatatcctttgccgtaaccgacttccttcatcaatttcgtcgccgcattacgcaagtgcaatggcacgggttcatcaatcgtctttttaatatccttttgcaccgctgtccgcgccttataagtggcgtttgatttcggcgcaagcgatagataaatcacgcactgtgttaaatgcacgtcgcattccggtaagccaatcgcctgacaagcttgaaagacgttcattgctaaattcaatgcattgttatcggccagaccaatgtcctcactcgcaaaacgaacgagccgccgagcaatataaatcgggtcttcgccgccgtcaatcatccgccccaaccaataaatcgctgagtcgacatcactattgcgcatcgacttatgcaaagccgaaataatattatagtgttcctcaccgtctttatcataataggcggtttttttattgagcagttcccccaatagatcgccatcgacggtcacttgatggtcttgcacatcactattaataactaacatttctaaaatattcagcgccgtccgtgcatccccattcgaaaagatggcgacttgcttcaataattcatcactgatatgaaccgttaaatccgggaaggcttggggcgcctttaaaacccgttgtagcaactcaataatgtccgcttccgtcaattgctttagcacaaaaacgcgtgaacgcgacagcaacgctgaattgatttcaaacgacggattttcggttgtcgcaccaattaggataatgctgcctttttcaacatacggtaaaaaagcatcctgttgcgccttgttaaaccggtgaatttcatcaataaagacaatcgtccgctcacccagttggcggttttcttcggcttcattcataatcttccgaatctctttgatcccattcatcgcggcactaaacgtgataaatttcgaagccgtcttgcgcgcgataatctccgccaacgtggtcttcccaacgccgggtggtccccagaaaatcatcgaagtcacttgatctttatcaatcatttcgcgtaaaaacttgcctggtccgactaaatgcttctgaccgacaaaactgtctaaatcagacggtcggacccgattagcaagcggcgcattcatcgccatctcttgatcaaacaaagaggtttgtcccattttttcaccccactttagttgttgttatcggacaggcgccttctttattgttatacgaaaagtgcgcgatcccataatgatgcgcttgtgattctggtaaaccagcaaataatttccgcagattgttcatgatactcgtataagtcgcgagtgttgagcgtatattcttaccaaccggcttggcatcaatgctgacgactgacgttaaatcggtcgtcaactgggtgacctgctcgggtaattgctcatgttggtggtgcgcttcaattgctggcactaaactatctagaatcaaactcgtcttcccggcgccggaaaacccagaaaccgccgtaatttggttatctggcactttgattgtgacatcatgcagattaaaatattggccaaccgtcatcgttgtctgctcaccagtcgttgcggcagtgactttaggatataagatgttcgctcgaccagcaatatagtggccaatcagggactgtggattctggatcaaatccgcgggtttcccttgggcaatcacttgtccccctttgcgcccagcttctggcccaatttcaatcacccaatccgcttgactgatgatattcacttcatgatcaactaccactaacgaattgccttgtgccactagctgccggaaaatatgaattagcccttcgacgttgtcaggatgcagcccaatcgatggttcatctaaaacgtacaacacaccagttgtcgctgttcgcaacgtccgcgccaattgaatccgttgaagctcgccagttgacaatgtattcccattgcgcgacaacgttaaataatccaaccctaattctagtaacggttgcagtgtttctaataggttcttggtagattgtaaaattaatccgaacgctgttcggacaaaaaagatcagcttcctttaaaatggtgtttaccacaaacccatcttttaggagctgatcttttgtctagtataacctattccgaacgaattaaaatcgaaaccttttgtgaactagggctgtccaatatccaaatgggcgttcggctgaaccgatcaccgtcaacaatttcttatgaattatctcgatgtcaaccttatcaggctgaattagcacaaacagatgccgaatacaagcgatcacgatgtggtcggaaaactaagctgagcgatgagttaaagcaaaaaattctcaaccatttacgtctaagctggtcaccaggaatgattgctcacgaatttaaactagctactaaatctatttataattggctaaatcaggggagaattggcttctccttgaatgatctacctgaacatggcgtacgccaacggcgtaacgttgaccaacgatccaaatataatcaatctttggggcgatcaattgaacagcgtcccatgatgattaatcaacgtaagcgcatcggcgattttgaactagatacagtcgttggtcctcgtgggcatagtaaggcagttttattaactttaatcgatcgcaaatcacggttcctttgggcataccggttaaaagatcggacgacagcgactgttaatgaagcactaactaagttcctaaccacttttaatggtccggtgcacagctttactgtggaccgtggcactgagtttagtgggctagtatcacttgaatcacaatatggtattaagacctattactgccatgcttatacgccagctgaacgtggtagtaatgaacgctttaatcggaatttacgttatttttatcctaaagggactcgttttgagcacattagtgctcaagatttaacgacgacgttactccaaattaaccagcgaccgcttaaaatactcgactggcaaacaccgtatcaggttatgctgacaaatttgtccaaaaattcggattaaatttgcaatctacctcttaaataaaattgtcgccatttgctgcatttcatccggtaagtcggccttagtagcacgcacccaatcttctaatgcgcctaacgtcaaattagaaactgctgcaatgttttgtccgccaactgtttgggtcagtaatgccggatttaaccgggtcccatgacacgttggacaggttgaaaaatggaaaaatgaattgactttagccattgcccgatcacttttaaccgattttagcgattcataaacagcgtcataagcattttcatagagggtattctccgtactaaacacacggcccgttgaggtatggaaatcaaccgcatacttcgcccgtttaccatgcaggacaatttctttttccttggccgtcaagtccttgtaagggacatcaattcggaccccaatgtgggccgcaacggttggcatgaaattccggcccggcaatcgccatgaggcaatcgctccgtcttcaatactgagattttcatccgcgatgattttgcgatcatctaacgtttgaatctgccccgtcccatgacattctgggcaggcgccagctgaattaaaggcaaagtcttcggccgatttagccataaactgcacttggcaagtagggcacgtaataatccccattttatcgccagctaagtccatcgcttgggcaatttttagacttgtttgaatcacgtgcccatttggataacgtgtcgtccctaaccgtgaaaaaatcaatctgacgacattaaaaatctcactcatcgaaccaacagttgaccgttctgatggcacacttggtcgtcgctcaagtgcaatcgctgatggaatatgccgcacttcttggacttgtgagcgtttattctgcgtaattcggcgccgcatgtacgtcgacaacgcctctaaataacgccgtgagccttctgcatataaaatccccatcgcaagcgaactttttcctgaaccagacggtcccgaaatcgccacaaattggttcaacggaatatcgacgttaatatttttcaagttattgacgttcccgccacgcacttcaatctacgttggttgttcaattgtcattattggttcgctccccgtttgcttgacggttaaaaacggccgcctctgcttctaaattcgctaaaattcgttctaaatagccgtcaacagctgccacttcagcatccgaaaagcccttgtaaaaaacggcgctcaatcgttgactaacgtcatcaccgacctgttgctgattagcgccttgttcagttaagtcaaagacccgcttgcgcttatcaagtggcgattgctcactcatcaataatccctgttcttctaagcgccgtaacatcaacgataaactactattggctaagccagtcacttgtgccaattccgtagcagtttgcggatgatgatcccacaatgctgacaaaattttcccctgttcagcgttatagcacgcgcgtggatcagccgttaaataacgattaaaaagtcgggtatttaataagcgaatcttcaaagttaaataaccaccctttttggttttcatcccgtccactcctaaattgtttttatatcagcattaattgtatcttactatataaaactaattttagcgagtaaaaaacaccatggtcaaccacggtgtttctaaagaagctgtttcaattgttctgcttggacactgcggacttcttcgactactactagcgcctgctggtcaatcgttgagaccaccggtacgagcgtcgcgagttgtttggccgtacaaatggcatacagcatcggccggtcattttgactatagtacccttgcgctttaatgatcgtgatgccctggtggaattgcgtcgacaatgtttgggcaatcgttgcatattgatccgaaataatcatcaccgcgcgttttgccccaaatttagccaataatttattcaaaacgactgctgataaatacaattcaataatcgttaagagcatattttggaagccgataatgaagccggatggaatggcaacaattaaatcaaaaaaaagcatcgcagagccgttttggatccctaaatagcgattggcaatcttcgctaagatcgtactaccagcaatcgtcccttggcaatgaataataatcgccattgcaatccccatcaagacgccaccaattatcgtcggaatgatcgtctgtgtcgtatggtagccgatgaaatgcgggagccgcaagaagatagaaatccagagtaccgcccagaccgaataccagatggtttgcttctctaaatacttaaagccgacaatcactaataaaccgtttagaaccaaattcgtagcagctggcggaattgctaacgcatagtagccaatcgccgttaagccagtcacgccaccttcaccaatataatgaggaatcaggaaatcattaatcgccaccgcataaatcaaggcgccaatgataatcccgagaccatttttaaaaagtgcttttttctgcatcccactcacgtcctcgttcaaactaacataagcgtaccatatttagggtgggagattaaagaacaattgattaactattaatttacaatactctatatttttcctgtgctaagaaaccatttacttactttagaacactctgccagtcattacttgaagcccatccattgtatatacttccacaatgttcctatcaacaatcagcaatacatcatcaacatttcctgtaatttgacgcctttcaattttcgatgttgcccattgacgtctttcaaaatataaccggtcctgatactttttcaagacagcattttgatagatttttattcgcgcgttttataatcaagttagccaaatacttttagctaattgttggcatgtaaaaattccttccttttgagagatgatttattcattataccctctcttaaaagttgtctcaggaatcagcttacatccaattggctactaagtgggtaaaaaaccattagcaccctaaaaaagcctagatcagacaaataatagttgtctgacctaggcttttaaagtgataatttaatcgtttgcgccacagtcttagaaatcccgagtgcttcgagttccgccactgaagcttctttgatatgtttcatcgaaccaaaattcttcaagagtttcgtccgcgtcttaggaccaacccccttgatgtcatcgagtttagaactcaacgaattcttcccgcgtaattggcggtggaaactgatggcaaagcgatgcacttcgtcttgaattcgcgttaacaagtagaagccttggctctttggatccaactgaatggtttgatcaacttccccatataacaacgaggcggttttgtgatgattatccttgaccatccctgcaacgggaattgatagccctaattcgttctctaagacgtctttagccgcattgagctccacaattccaccgtccattaaaatcaaatcaggcagtggtttatcctctttgagcaatcgcgaataccgccggaaaatgacttcccgcgtattggcatcttcgttggcgcctgcgcgatctgtcgtttgcgttaacttatacttgcgatagagtgtcttctccgcacggccatcaacaaacgtgaccatcgccgagacaggatcagtcccttgaatatgtgaatggtcaaacgcttcaatcacgtgtccatgtggtaagccaagcgcgtccataatctcatcttgcgccccaacggtcttgcggttgtcgagttccaataaacggaacttctcttccaacacaagccgactatttttctgcgccatttccatcaacgcttttttctcaccacgttgcggcgtgcgaatcggcacattcaaaatttcggtgaggactttcttttcgaccccttctggaaccagaatttcgcggggtaacacattattcttgcggttgtaccattgtaaaataaaggttgccaattcttcttcaggtgtgctgacacacgggaagagccgcttttcacgccgaatcaaccgtgcttggcggatgaagaagatttgaatcgataaccagcccttatccaaataaaaggcaaataaatcgcgcggggtattatcgttagaaataattttctgcttttcaacggtggcttcaatgtagtggagttgatcgcgcaattctgcggcgcgttcaaactgcatctcttcagcagccgtagtcatcttggccgtcagttcttttttaaccggatcaacttgcccattcaagaaacgtttaatctccttgatttgggccgcatagacactctcaggcacttctttgaaacacgcgcccaaacattgacccatatgataatacaaacagggccgcccttgatgtccctgacagcgtcgtaaaggataaacccgttgtaagaatcgcaatgtttcttgggcggcatacacgtccggataagggccaaaataaaagccgccatcttttttgacatcccccgtgatcagtaggcgcggatcgcgttcattcgtaattttaatgtaggggtagcctgtgccccgcttaagtttaatattaaagtaaggttggtgtttctggattaacgtaatttccaacaaaaaggcctctttatttgtcgatgtgatgattgtttcaaaatcgacaatttcagagaccaatttggccgtttttccttcgtgactactcttgaaatacgagcgcacgcggtttttaagattttttgctttacccacatagataatcttggcattgatatccttcatgatataacaaccaggtaatgcgggtaagagtgctaatttatgttcaatgtgttcgcttgccaaaaacaccactcctttaattcaaaacaagtgttcgtttttctattttacgtgtttttggctaaattgcaactattgtgctaggaccttggctagaaattgttgcgtccgttcttcttgcggatggtcaaaaatggcttcggggtcccctttttcgacaatttgactatctgccatgaaccagacttcatccgccacttcgcgcgcaaaccccatttcgtgggtgacaacaaccattgtcatcccttcttgtgctaagtcttgcatgaccttgaggacttcgccgaccatttctggatcgagcgcagatgtcggttcatcaaataacaatacgtcgggtgacatcgctaatgcccgcgcaattgcaatccgttgtttctgcccaccagagagttgatcactataagcatccgccttatccgctaaaccaacgcgttcaagcaacgcttttgctttagccgttgtttcggccgctgattctttcttcactttttgtggcgccaacgttaagttatcgaggacagttaaattggggaaaaggttaaagttttggaaaaccatccccatctttgtccgaatctgatcaagctgtttttcagataacgtcatcaaatcggtgccttcaaacagaatttggccactcgttgggtcctctaaacggttcaagcaccgcaataacgtactcttacccccaccggaagggccgatgacaacaatcacttgaccagcttggacttcaccactaacaccatttaacacgaggttgtccccatattttttaaccaattgattaatcttaagcatgttgcatcttcctttccacatagttcaaaagtttcgagagactaaaggtcatgataaagtagatcaccatcgcaacaaaaatcggtgcaacgcctttataagttgctgattgaaccactttgagttgataaattaaatcagtgaccccgataatggaaacgattgaactttccttgattaaagaaatgaattcgttccctaaagcaggccagatattcttcagggcttgtggtaaaacaatgtaacgcattgtatcgcgttgtgacaagcctaaacttcttgaagcttcagtttgcccagcatcgatcgcattgatccctgaacggataatttcagcaacatacgccgcactatttaaggaaacggcaattacccctgccaaaagtgctggaatgttgacccataagccaatcccgaagtagacaaacatgatttgaatcatcaacggtgtgccccgaacaaattcgatatacatgactgccagcgcacgcaccaacttattcttggccaaacgcccaaaggctaggaggaccccaattaaaatcccaattgcaattgaaacaatcgtaatgaataatgtgtagccaatccctttagcgaagtatgaccaatagtgccacatgctagtgttgtgcgtattgaccttcatgagttggcccgcgttctttaagtattgcggaattaatttttgctttttaatttgcccgatactcttattagcagcagcgactaaggttggcgaatcctttggaaaggcaatcgctgatccttgcatgtctgcgcctaaatcaaatttcccattaatttgaacgagttctggatcattacttgcataggcggttgcgactggttcttccgccacaatcccgtcgattttatgactctttaatgcaaggacgagatctgggactttggccaagcccgtaatctgcgcatctttaatttgctttttagcgagtgtttgttggagactccccgtttggacccccacttttttcccgttaaaactatttttggagtggtaaatcttcgcatcagctttattgactaagattgattgaccaccgagataataaacatcagaaaaatcaacactcttgcttcgttcatccgttggtgacatcgccgaaataaccatatcgactttaccggtttccaaaccaaccaataacgcatcaaagtccatcgacttcaccactaacttaacgcctaaatcatcagctagcttctgtgcgacttgaatatccataccgacaatcttgttcttaccgtttttattcactaaaaattcataaggtgcataatcggggctggtccccaaaaccaacgtttttttagcttgcacttggctaaccgtctgtccagctgccaaaacgggctgctgctgaatcatgaaaaacgttaacattaccatgaatggtaacccaacaaaagtgagtaattttttaatcgtcatattatctcctcctctgattaggactatcatacaaccaattaaataattatgcaatatttatttataaaaagtgaatcattggcgaaaccgttattatctggtatgatagatgcaaattagaaaagagggattacgatgggcttaaaagtcactaacaagaccgatttaaccggtttattcgataaattcgcatcactaccagaagaacgccaaaaagttgaagcacaagttgaagaaacagctgataaattaaaaaaggtagatgcagaacaaaaagaaaagcattaaacaaagacagcaaaaaaggcggtaagacaaattcatttttgtcttaccgcctttttgctggtttaaacgtgcgtcatttgcaatcgcctttcggttaacgcgattgtacgctttattctgcgtgtctttctgggtagcgttgttttaattgttcaatgttttcgcgcgcgactttatcaaagtcgaggttattccattccgcaatttgtgataaataccaaagcacatcgccgattttcttagacatcattttttcatctagttcgtggccttggaacgcatattttttaacgatatcaaccacttcaccactttcacttgctaagcccaaagctaagttagttaacacttgttcgttaccatataacgttcggttggctaacttttgatagtcattaaattccattatgcttgtccccctattgcacattgcttttcaatccattcccaaactgtctctttaccagcaccagtcagtgcgctaaagcagacaaattgatcgactggattaaaatcaagcgcttctttgatgattttttcttgacgattccatttccccgttgagatcttatccatcttagtagcaaccactaaaacagggatatcataatacttcgcaaaaacgtacatcgcgatatcatcatcggttggttcgtgacggccgtcaattaatgaaataagcccctttagatttgagcggctggttaaataagcctcgataatttgcccaaacttttcacgttgcttctttgaaactttggcatacccataaccagggacatcgacaaagtaaagttcgttttcaacgcggtaaaagtttaaagtctgtgtcttacctggcttgctagatgtccgggcataactcttacgattgattaatttattaatcaatgaagacttaccgacattcgagcgaccagataacgcaatttcaggtaattgatcagttgggtactgcgaagcagctaccgcactcatcaccatttcaacatcatgtacttccataataacctccgattatttccttcgaatgttagtttagcataaataaataattattgcgccgttgacatctctctagtttcatggttaacatatcttcttaaccccgttaaatcgcgtcattgtaccgtttcaaaagtcccttaatgcaaaaaaactgccgcgacaaaatctaatttgtcccggcagtcttttaatttttatgacgcttcttgtccgtcagctaaaaagagttgtgggttggctgtgccatccaccgcttctttcgttataacaactttagccacgtcttcacgacttggaatatcaaacatcatatccatcatgacttcttcaatgatcgaacgtaaaccacgggcccccgtgtttcgttcaatcgctagatgtgcaatcgcatggagtgcttctggtgtaaattctaattcaacattatccaaggccatcaacttgctgtattgcttaacgagcgcgttcttaggttcagttaaaatatgcaccaaatcatcttcagtcagtttttccaatgcagcggtaatcggaatccgaccaatgaattcaggaataatcccaaatttcattaaatcttccgttacaatttgttgcattaagctttgatcttcattggtagtttgaccattcttgcttccaaaaccaattgtcttttcacctaagcggtttttaacaatcgtttcgatgccgtcaaaggcgccaccaatgatgaataaaatattggtcgtatcaatttggattaactcttgttgtggatgcttgcgaccgccttgaggtggcacactagcaatcgttccttcaagaatcttcaagagggcttgttggaccccttcaccagaaacatcacgcgtgatcgagacgttttcactcttcttggcaatcttgtcgatttcatcgatgtaaatgatcccgcgttcagcacgatcaacatcgaagtctgcattttgcaacagcttcaagaggatattttcaacatcttcacccacgtaacccgcttcagttaaagtcgtggcatctgcaatcgcaaatggcacatttaaaatccgcgctaaggtttgcgcaaggaatgtcttcccggaaccagttggtccaattaacgcaatattactcttttgtaattcagtatcgccttcttcggccactgacatttggttgacccgcttgtaatggttgtagactgcgacagataaagcttttttcgcttctgtttgaccaatcacataatcatttaaaatggctaaaatttcttttggctttggcacttctagtaaatcactgaaggcctcatctttaaactcttcatcaataatctctttgcaaaggtcgatacattcgttacagatataaacaccagggccagccacgatctttttcacttgatcttgcgacttcccacaaaacgaacacgttacgggtccgttagttgtttctgtatcatctagcatactgggattctcccctttctcgatatacgcttaccgctgtgagtcgttaaaatacacccctacaacgtaattcagactatagcataactatggtctagaataaagtaaagttactcgcacaccgtcaatgacacaaaagcgggtccaaagtaaacaccttgaacccgctttttagcatcatttaaagcttggattgatcagacgaccttatttagcgtctttcacttctacagctgaatcagcaatgatttcgattgctttcttaacaccgatatcatgttttaacatgtcatctgataagacgctacgaacagcagcttcttccatattgtattgttcagctaaactcttaagttctgcagcaacttcttcgtctgttgcttcgatgttttcagcttccacaacggcttcaagtacaagacttgtcttaacgcgtttgtcagcatcaccagcgaattgtttcttcaaatcatcttcagttgtaccagtgatttgatagtacatttccgggttgataccttgttgttgcatgttacctaagtattgttgtaattgactgttgatttcttcgtcaatcattgcttgaggtaattcagcgattgttgcattttcagttgctttagcaacggctgtatcttggatagcagcatctgcagcatcatttttttgttgttttaattcttcacgaattttttcttttaattcgtctaatgtatcaacactttcgtcgatatctttagcaaattcgtcatctaattcaggtaattccttagctttcacttcatggattgttaccttgaagatggcttctttaccagctaattcttctgcttggtaatcttcagggaaggttactttaacatcaacgttgtcgtctgctttgtgaccgactaattgatcttcgaaacctggaatgaatgaatttgagccaagttctaatgaatagttgtctgcttgaccaccatcaaaaggtacgccatctacagaaccagcataatcgatgacaacagtatcgcccttttcagcagctgcgtcttcttttaataccaattcagcttgacgttcgcgacggttttcaatttcttgatcaacgtctttgattgtaatgcgacggctttgttttggtacttctaagcctttatagtcgcctaaagttacttctggtttaacagtgacttgagcagtaattacccaaggttcgcctttttccattttttcaacattaatttgtggttgatcaactggttgaatagcagcttctttaacagcagcatcataagcttctggtaagattgcatttaaagcatcttcataaagggcttcttcaccatacatcttgttaaagatttggcgcggcattttacctttacggaaacctggtgtgttgatatttttacgtacacgtttgaacgcaacgtccaaaccttcactaattttatttaaatcaatttcaaaggttagttcaccatcattggtgccctttttttcccattttgctgacataatttccctccgacagttatattcacaatctatcaattgcatacttaatcagcataaactatttgacctaaattgtaaatatttattggtctaaaaagcgataaaacccgatattttaatcgtttcaggccaacttttatcgaatttaatgcacaaaaaaactcgcagtttttacactacgagtttttcgattcaactaggttgaatattagtcgataatttcactaacgacaccggcaccaacagtacggccaccttcacgaacagtgaacttaaggcctttttcaatagcaactggtgagattaattcaacagtaaatgttacgttatcaccaggcataaccatttctacaccttctggtaattcgataacacctgtaacatcagttgtatggaagaagaattgaggacgatagtttgagaagaatggtgtatgacgaccaccttcatccttgctcaagatataaacttcacccttgaagttcttgtgagtttggattgaacctggtttagctaaaacttggccacgttcgatgctatcgcggtcgataccacgtaataaagcaccaacgttatcgccggcttgaccttgatccaatgtcttacggaacatttccaaaccagtaacagttgtcttagcaacttcgtctttcaaaccaatgatttcaacttcgtcaccgacagtaacttggccacgatcgatacgacctgaagcaacagtaccacgaccagtgatcgtaaatacgtcttcaacaggcatcaagaatggtttgtctgtgtcacgttctggagttgggatatattcgtcaacagtagccattaattcttcaacagctttaacgtcgtcagcattgccgttcaatgcaccaagtgctgaaccacggataactggaatatcgtcaccagggaaatcgtattctgataataattcacgaacttccatttcaactaagtccgttaattcgtcatcatcaactaaatcagtcttgtttaagaagacgatgatgtagtcaacaccaacttggtgagcaagtaagatatgttcacgtgtttgtggcatagggccatcagttgcggcaacaactaagatagcaccgtccatttgagcagcaccagtgatcatgttcttaacgtaatcagcatgtcctggggcgtcaatatgtgcataatgacggttttctgtttcgtattcaacgtgggctgtgttgatagtgataccacgttctctttcttctggagcagcatcgatgtttgcatagtcttgagcttcagccaagcctttgtctgccaacatctttgtgattgctgctgttaaagttgttttcccatgatcaacatgtccgatagtaccgatgttaacgtggggttttgttctttcgtaatgtgctttttctgccattaaaacgaacctcctgtattttcgcaagaaaaaatcagtgtttagatttactaaactgataatcctttacataatattataatacttcaagcgctaaaatcaaagtgtttttttacacttgaagaattcaaaaatgattatatctgctatgagcgcgtttgtaaacacttaatgctcaaaaaaagtcagttttgaaacgatatttaggtgttttctactctaaaaatcaagtttccctgtcatttcttgcaactttttcacccagtcctgtatcttttctgaaataaccactgacgcggtataatccggacccagtaactgtttgagccatgcttgcgcccactccgtaggattatacatgatttcagcttcaaaaggatataaatatgcaaatcccatctcaacatccgccatcacttgtgctaacaaagtcggatcttcagtggctaactgctcatttaacgccgctaacaccgcattaaacgtcgggctctcctccatcagttggatatcggcaggtacaaaagtttttgtctgttcaaaccattgcatcgtgactaattgttcaatattcagctggacgagcgtttcaatgacagtcgtcttcacgaaagcatgactgtaaggattcgttaaaatgggcgcaatactggtgacataaacattacgtggtaattgttcagcctgcgtcaacattgctagctgttcagctaatgggtgcgcagtgaggttatagaggccctctgcttgcttttgaatcgctgcttggtgattcgcttggtattctaattccgcagccgtaatcatcattctaagcgtcttaatgacttgcggggcaatcgtcgcatggcgtaatgcctcccacacttgatttgccgtaataaaacggtggttattcagtaataatgcaagataaaaccgcactaaatctgtttgttgtaagtagtccgcttgttgttcttcgacgattgtcaatgctgtttgcggatcaccagcttcaatcagcgcactggcccacaataaattcgccgacaacgtctgttctagttgatacgcagcttcaaaatggtcgcatgcttgctgccaattttgttgatttaacgctactttccccatccgtatcagccgatcatactgatctggaaattgcgtaatgtcacccattcaatcacttccttttgacaattaataaaacaatagcgcctagaatcaactgacctgatccagacgctattgtttctaaatgttattcagcggctttttcagcctttggtttattatcttttctttgacgacgatgattttgattaatttccataatcactggtagaatcactggccgacgtttcgtttgttcatacaagtaatgacttaagttttcccggacatcttgtttcaaatgactccagtcaaattctttgttgtccagattattttgcaccgcatttttgataatttcggcactctcagccattaaatctttgctagtcttcacgtaaacaaaaccacgtgcggtgactttcggttccgcgataatcttcttattcttgcggtcaatcgtaacaacagcgataaaaatcccgtcttctgataataatttccgatcgcgtaaaacgatattcccgatatcgccgacaccgctaccgtcaatcatgacgtcagttgcgtcaacttgtccgccaacatgcatcttccctttttcgtaagcgacaatatcgcctttaccaacgatgaaaatatctttgtaatccattcctgtttcatgagcaatatcagcgtgtgctgctagttgccggtattcgccttgaacaggcattaagaattttggttgcattaaattcaacattaattgcaagtcattcttattggcatggcctgaagcatgtaaatcatcgccaaccgccttaacttcgccacccgcacgataaatcatatctttggtcttcgctaaaatcgtttccatcgcgtgtgaaggagatgtcgttaaataaaccaagtcgccttcttcgatgtgaattaaacgatgatgactagttgccatcttttgaagcgccttgattggttcgcccatccgacctgtttctaagatcactgtttgttctggtgcaagtgtgcttaaatctttaggttggaccaagatatcgtcatctggcaaaataatcatcgataatttcattgctgtccggacgattttttctaaatcacgacccgttaaaaccactttacggcctgttttataagccgcatcaatgacttgttgaatccgcataatatttgaagccactgaagccacaatgatccgacccgtttgatacttgaacgtttctaagatggattcagcaatatcgcgttcgttagccgttgcaaatggtgattccgcattagcagaatcactcaagagtgctaaaacaccttgtttgccaatttcagctaagcgtgcataatccgtttgatacattggcattgctgattgatcaaacttaaagtccccagtataaacgacttgtccttcatccgtcttaacgacaatccctaatgaacctggaattgtatgcgttgtcttgaagaatgaaacggttgcgcgttcaaaatcgattgctgtattcgcatcgatgacgtggaagttttggaacttacgtaattttggttcgctgctaaccgtaattttagctaaagcaatcgttaattcagacccaaagactggtacatcatgttcctttaagaaataaggaagcgctccaatcgcatcagcatgaccatgtgttaggaaaatcccagcaacacggtctgcattttcttctaaataggtcatatcaggaataacgatatcgatccccaataattcagtttctggatatttcaacccacaatctaatacataaatttcgtcgtccacttcaacaatgttcaaattcttaccgttttcacgaacaccgccaagtggcataatcttaatgttactcattctttcacctctagcacttgaggaatttattccccaaactattttgtttgttttagtcgttcattcgtttaaaactcatccgccttaaagtctaactcatattttatcacaatttaaacaaactaacagcttttgattactaaaagccttttgagcacaaaaaaagcgggtccgcataacggacccgctttttgaaaatgaattaacgacgtaagccaaggctcttgattaattcacggtaacgttgaacatcgctttcacgtaggtaacgtaataagttacgacggtgaccgatcttcttcatttgaccaacatatgaatggtgatctttcttgtgaacagataaatgttcgtttaatgagttgatttctgcagtcaatacagcgatttgtacttctgctgaacctgtgtcgccttcgtgacgagcaaattggttaatgatttcgttctttttttcttgtgaaatagccatgctaatttccacccttctggtataatagcctagaacaacgtaaagcgtcgggtgaacgtcgctaaacagagtagtaggcctgtgcaataagcacttttcaagtttactaaatattagcgtcaaaagcaaggcacagtttcaaactatttaagcagtcaagttgaaatactttacaagtttttattgcaatcactctcactattttggtataataacgactgttgaaattaaaaatcttttttataaagatagtgaaacccatcggaggtgaacaacatgccacaaattaaatctgctatgaaacgtgtgaaaacaattgaaaaagctaaccaacgtaacgcttctcaattaagcacaatgcgttcagcaatcaaaaagttcaaagctgctaaaacagcaggcaacgaagaagctgcagacctattgaaagctgctacacgcgcaatcgatatggcctcaacaaaaggcttaatccatgccaacaaagctggccgtgacaagtcacgcttaaacaaaatgatggctaaataatttaaccacaaaaaagcccccacaaccatttggtttgtgggggctttttttgctttaagcaacatcatctgtcgcaaattgtaacataaacagttcaaacaataaggttgcttcaccttgcccagtctttattttttcttcaatgccctctaaacctagataggcttgggcaagcgtcgccttagaaaagtgccgaatttgttgcaatgctaatttgatgcggtatgggtgaatttttaagacgctcgccaaattaccttggctataccctttttcaaaaagaattttcacttggagtaacaagcgaaattggcccaacaagatggcgttaattttcagcggttcttctttttgtagcaataaatcgtgatacatctctaaaaccggaccgacctttttttgtaaaactaacggcaccaattcaaaaacattatcttcaatactacttgccactaatgcactaacggccgtttcagtaatcacccggctttgttgcgcgtaaagcagtaatttgggtaactcagccataatctgactgtaatcaccattagtcttgcttaacaataacgtcattgccgctggttcaatcgtgacttgttcactttgcagttgcgctgtcactaactgctggacctggcgctcattaatcttttgaacgtcaatgacagttgccatcttcttcagttgtttaacaatcttcttgcgttcatccaacttcgcgtatggcgcgaagataacgagtgccgttgtcggttgtggctgttctaaataagcttggaatccttttaaatcatgatcaagtttagttttaactttttcacctgttaagaagaatggattctgcataaaaacaattcgtcgctcaccgaaaaagggggccgattccgcatcttctaatgcccgcgccacctccgtctgggcgagatcataactcgcaaagttcatcgtcatttcttctgtcgaaagcgttgctttaaataacgctctaacctcttcaatcagcgctgactcttgtcctaatacgagatacaccggtgcaaacgttcctcgattcagtgctgtttttagttgttctgtcttcatttagtcacaatcctttagtgttgttttaatcattggcacttggccaaaaccatagcgccattccagcatcccacagtcagccgtattccaaaatgggacgttcgcacgttttaaagtctgcaacgttgcggcatgtggatgaccataacgattatggcgtcccgcagaaatcaacgccccttttacctgccacgtcgcaattgactggggatcactcgccgtttgactgccatggtgacccacctttaggtaatcaacgcgtaattgtgggtagcgatcaacgattgccacttcacccgctttttctaaatcaccagtaaataaccaactcgcaccaccaatttgcgtttgcaaaacgagtgagtcagcattcccgcctggtccggccaccactggcgctaacacattgatttgttggtgaccaatcataaaatgttggtccgccaaataaggctcaattgcaacttttgtaagatgcggccgcacttgccgttgaaactgccggttttgcggtaagcccgcagcacaaatcaaccgtttaactcggatatgttgcataatttcatttaagtcccctatatgatcagcatcctgatgcgataatgcgattgcctctaaatgatcaatgccacagctgtagaggtaattaactgttactttttccgcccgactcacaatttgccgccgttgccacttttcttgcggtaaagctagtcggccgccggtgtcaattaacaggttatgtcgattgaagggttgttgaatcaacaggctatcgccttgcccgatatcaaacataatcacgcggccaaccggattaaagtggataccaataaaactaatgacatacaggctgataacagccccccagccccactttgctcgccgaccagtacttgccatcaaccatagtgtgcctatcacaattaaaaagagtggtattagctggattttaccgaaagtaattgtcgcatatgggaacgttgcaatccaagctaatcctttatacagcgtcgttagcaggccttcttctaaccaaactatcatatgactaacaggccataagcaaatcgctaccataatcaaacccaacatgactggtaagaaaatcggcgcgacaatcccattaatcaaaatcgtcaagatatgccaacgataattaaaccgcaagcacaccggtaaacttaacaagcctagccaaaatgccgttgtaaaagtaccgtggcgccgctgataaatcaatccaaaagccatcagatagctcagcaatccccccatactgattaataaatacggctgccataaaagattgaccagcaatacccaactccaactatctaaacgcgattgctgaaaatgacttacttcgcagattaatcgtagtaagatcagcccgatagcgcgtgtaatactcgtgcctccccccacaaacaacgcataaaggggtagcaaacaaaacaagctaacattcacccattcacgcgggactcgacacagcgttgccaatcgacgaatgattgtcacaaagtagaatacatgcaatccggataaactcaataaatgaataatccccaattgacctaacacattctggtaggccaggccatctgactctcgaacaccacataacaacgcctctgcatgaaaactcaacgctggtggcaattgtcggagataaatcagcccctgttggcgccgttggtggaaccaatctagccaaccttgtggtggaatgcgtctaaagaccgttccgtcaattatatttgcttgataaaaacaatgcttttgctgtcccataaagcgcgcatagtcgaactcattccggttagtagcaccttggatacgctctaattcaatatcacccgctaataataacggctgattcgtcgtttgccaacggcgtttttccgctgaactctggcagcgatagtagcaaacaacacgttggtcatcattctgcccctgcgccattaattgaatctgatcgccagccactttgatcgtatcgggttgaatcttatatacttgattatttggtctaaccggctgttcgtaggtgcgccgtgccagccaaaaatggcaaccgcctaaacacagtaccagtccactgaccattaacacagctggttggcgtaagcaccacagtcgcagtagacacactatcaaaagacagctaaaaaaaagtggtgcttgtcctagtaataacgcatttaaacttgctaaacaaataactggataaacccagttattcttaatcactcagcagtttgttcattctccaaaaagttaacgagggtgttggcgtcattcgccgttaaatcgacttggtccaattcaataccagatttttcaatcaattcatacgcatattcgtcgttatgataatccttttgataatggattttactgatcccagcttgaataattaatttagtacactgaagacatggaaaatgtgtgacataaatttcggccccttccgtctgcacaccaaacttagcgcattgagtcaaggcgttcatctcggcatgaattgttcgtaaacaatgcccgtcccgtaataaacagccaacatcgatacagtgactttcatgtgccaccgaaccgttgtagcctcccgcaataattcgccgattacgaaccaccaacgcacccacaaacaatcttggacaggtgctacgcatcgacaacaagaccgattgaagcataaaatattgattccacggcattctcttttctgacacacgaattccccctttaaagttaatagttttagtatagcaaaaaaataccattcacaaactaattaacacaaatttgtggccgtaattgttcaaacgttttcggcccaattcccccaactttttgaagatcttcgatttgtttaaactgcccttgctcatcccgatatgcaattatttgttcagcttttttaggaccgatgccatttagcgtttgcaattgtgtcgcatccgcttggtttaggttgattttagcatcagttgatatcggactggctcccgcttgattgtcagtcgcagcctgtggctcgtctgccgctttcactaattcttcggcttgcaccgcttctcccttagttggcacatagataataagttggtcactcaatgtttgcgctaagttcaactgactcgtatccgctgcttcggtcacatcccccgcttgtttcagcacctcaaataaacgcgtctttgcaacacaaatcggataaatccctggatgtgccacagcgcctttgatatcgacaaacccaccttttgagacgcttttcttctgtttgacgggttttgccttcacttttcgcttagttgattgcgccatcaattgttgattggttgatagaaaacgttgttgccgactatgctgccaaaacacaccaccaccaagtaaaattatcaccaaacaaggtacccaccagaatcgacgataccgttgccaatagtcgcgccacatttttcgccacctccttattcctaattaccccaaaacgcaaaaaaaatttgccgattctttcgaaccgacaaattttttaatgtttggctaaataatccaatgcatcgtccaagtttttgacaggaacgattttcatcttagtaccaatttttttagcggctgctttggcaatcgcataattattttgataatggggttctacctttagtatggcttttgtcacgggatcatcaggtgcgaaaaagactttggcgccttcttgactcgcaatcagtaccttcttatcaattccgccgattggtcccactgtcccatcaggatccattgtccccgttccggaaatcttgcgaccacccgttaagttttgtttcgttaattggttataaatctgtaacgtaaacatcaagccagcagaaggaccaccaatttcacccgcatcaatcttaaccggcacttttgtcacaatttttgagtgatctgtcagcgtaattcccaaaccagcgtagcgcgatttaggtaatttaatcaatttacgagtcgcagtcttacgctggccattatgttcatagctaatcgtgactttttgattcactttaagcccttgaacatacttgacgaacttatttgcactcttaaattgatgctgatcaattgccgtaattgtgtcaccaatagccagatcttttttaaaagctgaattatctaaaattgacatcacatagacacccagatattgagtgtggtattcctgatgtgccttttgataagccgcctcaatcgcaaaattaatcgagctttccatgtagtatttttgaatctgatcatacgcttcagtatcatcgtcacccattagttcatcacgactaataatctccgtaaaaggttgtgttttagacagtaatagctgtaaccccgtcactggtccttgaatcccgacggttgttaacataaagtggcccttatgttgatctcgttgaccgttaactttaacaaactggttggtattttcagccgaaccgaccccttcgacgtaataatgcgttgggataaagcaaaaagcaaacacgacgatcaagccaacaatccataggagatgcttcaatagacgtttattcttattcatattaatcactttcaggtcctaatttttgtgcaagcgcagacgcgacaaccggcggcaccaattgttcaacctggccaccaaacgttgcaatttccttcaccatacttgatgagataaaagcaaattcttgctttgctaataataacaccgtttctaaatcagcatcttgtgtctgattcaacgccgcaatatcacgttcatactcaaaatcattggcattccgaataccacgaatcaaatatcgcgcaccgacttctttagcaaaggttgccgtcaacgtcttcgattgtgcgattaccttaacgttatccaagtgttgcgtcgccgcttcaatcagttcaaccttagtggttgcgtcaaataacggttgtttagcagcgttagtcatcaccgcgataatcacttggtcaaacaagtgacttgcccgttcaacagtatcgagatgcccatttgtaaacgggtcaaaacttcccggaaataatgcaattttcggcatatagctgcctcctaaccaataaatttaaagattgctacttctgtaatcccataattctgttgccgtttcagtatgtaatgcggaatgtcagttggataatcaaccgtcgtatcggtttcgcaaagaatcgtcgcgtctggtgctaataaccccatttcgacgaattgttgtaactgaagcaacatctgttgttccttgtagggtggatctaataaaattaaatcgaattgaacaccagcatccgctagtttcaccaacgctttttcagctggcatcttccagattgtaaagcattctggcattttagtaaccgcaacgttttcttcaatcgtttgaatcgctgcatattggcgatcaactaaataagcatgatccataccgcgtgaaacggcttcaattgcgagaccaccgctaccggcatataaatcaagcgcctgcccaccgtcaaaaaattgccccaacatactaaacattgcttctttaaccttgtcagttgttggccgtgttttcatcccagggacagcttttaacttgcgacccccaaattctcctgcaataatccgcatctctattactcctctaattctgccgcatcggcaatttcttgatctgagcgtcctactcgattactgaaatccatatcaatagctggtctttcagaaggggtcactcgtttgacgtagtgtaatttttttaaccgttgcataacagtttcggcatctgccatatctacgtatagataaacatatttcattcgtttcgaggtgtaatacacaagtccgtaacggcgtaattgctttacttgtcgtaatgaatagagccagacgacaattccttggcgttgtgtgatttccaatgtcatttaatcagtccttttacatttagtcaaaaatcatcattgtttgttcatcggtacacagaagcattaagtgctgatagcttggattattaatcgcaagttgcaacgctagattctgttgttgcgcaagcaccagcccttgggaattgagcccttgtggccaataaaaaagttgctcgcgctgcggaaaacccgctgctcttaacggagcctgtttaaagtcggttgctgttaaaaaggcgtccgtctcttgtgtcgcttgtttgcgcacttggtgcagcttttgcagtccctttttagtcaaccactgcgttggtgtacttgttaattcactcaccaaattctgtgtattttgcaatggtagttgatttatcgtgagcgcaggttggtcattattttggcgtaatgtctgcaacgtttgcaccaaagcgagttgtcgttgactatctgtttgcggttgttgcgactttgctagctcatccactgggactggtgtttttgaaacaactcgatataaatcagtttgtagcagtcggttcgcatttaaatacatcacagctgtcaatcgttcttgctgcatcactaaagttgcaaacgtctggtttttaaacatcactaacggcgtttgttggtgttgctccggcgttaaccgcaacttaaattgttgctcgtgtaacgtcactaagagcgaagttggtaacgccgtcttcttagttaatgtagcccgcttttgaaaaaaatgaaacggcgccacatcgttgtccgcaccaacaaccatgatttgttgtgtttgattggattggttatcaatcagcgcttcgacataccgtcggctatctaagtgaaataaccaccgtcgttgattttcatcagtcagctgttgctcgaccggttgcccataggttgcaattaattgttcagctggttgattaatcagtttcgccggcccttgtgttttcgtcagtggcgtttgttttattgaccgttcagtcgacggggcttgtgcaaccttaggctgattaaccgctggtgtttggatcatcggccaaccataaaggatgaccaaccagacaatcaatgcaacgattaatcggcgtgccccttttatcatgctttcacctcactaattcgctgccgcagcttttttctcttgtgcgctgatgttcaacacgattcccagtgcaatcgctagaaccatcatacttgatcccccataactgatgaacggtaacgtcaccccagtaatcggtaagattcctagcaacccaccaacattgaatagggtttgcacgaaaatgatagtgccaattccgtaacataataaagtgtgatacatcttagtcgcatgaatccctaggtaaaaaatccgtgctagtagcgcaaatagtaacgcgataatcacgagggtcccaatcacacctaattcttcagtggtaatcgataaaataaaatcggtatacggttctggtaagtaaccgcgcttttggatactattgccaagccccaagccaaaccaaccaccattattaatcgcatagtaggaattcactaactgactcccacccatattttccaattcaaatggatgtaaaaacgataaaatccggttgaacttataagaattaacgttcgttgaaaagttaaagtgccgtaaaatactaaataaaatcataaccgttgttgtgaccgctgtaatcagtgaaaaaccataccaatatgacataccggtgccaaaaaacatgactaccatcacagcagccaagatactagcgccccctaaatcaggttgaataaacaccagtaagatgattccagcgactaatacaaccggactaaagaataattttaaattatcaacaaatccgtcggccagttcattttccttacgtgagagcatattagcaaggtaaataacaatcaataatttcgcaaattctgacggctgaatggtcagtggtcccaattgaatccacgcggtagccccattaatcgctgcgcttggtctgaaacgacttaacagcaataaataaatgagcgccaagaaaaccacaatcgtcattgcttttagaaaagtgcgattttttaaaacggataacttaagaaaatatgtgatcatcatcaaaataaagcctaacgcgataaatactaattgcttggtaaaatacgcatctggtttcattccgcgaattgacattaaatccgaactcgccgaatagaccattaaagcaccaaatgcacataagataacatatggtagcaataaccaatagtctaaatactgaattttacttttttgaaactttttccacacagttacacctaatttctatttcgttcgtattcagcctgtccttgcccaacttgcatgccaatttgattgacccgttcttctaactcacgcatcaaagttgcaccctgtggcgcactaataagttgcatccgttttgcaaaatcaacctcgcgcgagaaaccaaataattgggtatcaattacctcttcaataattggacattgactcatacaaagcgcatcaatttgagcacgcaatagttgctcaatgcgtagcgcatccgcttctaaagtgagataagctgttgttttttgttcaatcataatttacgcctacctattcgttattaaaaagcatactctgttcgttattataccatatttatgcacaaaaaaaggtagccaagcggctacctctaatggtttttaatgattaaccttttttacgtttcttatcagctttttgacgcatacttgtgtcaagaatcttcttacgtaaacgaacagaagtaggtgttacttcacagtattcgtcatcgtttaagaattcaattgattcttcaagtgacatttctttaggtgtcttgatggcagctgagtgatctttaccagaagcacgtgtattcgttaagtttttacccttagtaacgtttacggcgatatctgtatcacggctgttttgaccaacaatcatgccttcataaacatcaacgccagcgccgatgaataattggccacgatcttcaactgattgtaaactataagttgttgatgaacccgcattgattgaaactaatgcaccgttacgacggcctggttcccagttcttaatcactggcatgtatttttcgaaggtatggttcataattccgtatccaccagtcatcgttaagaattctgttgaataaccgattaaaccacgtgaaggtgctaagaaagtcatccgtgtttggttattagcatcactttccatgttttgcatttcacccttacgttgggccattgagtcgattactgagcctgtatattggtcaggtgtgtcgatttgaaccatttcgaaaggttcgcatgtaacgccatcaatatcgcgatagataacttctggacgtgacaattgtaattcgaaaccttcacgacgcatttcttcaactaagattgaaagatgcaattccccacgacctgaaacaatccaagcgccggctttgtcggtatcttcaacacgaagtgaaacgtcagtgtgtaattggtgacgtaaacgttcttcgatcttacgaccagtaacgaaatcaccttcacggccaacaaatggtgaatcattagcagcaaatgtcatttgtaaggttggttcatcaatccgtaagattggtaaagcctcttgatggtcaaccggtgtaacagtttccccaacatagatatcttccatcccagaaacagcgattaaatcgcccgctttggcttcttggatttcaacacggtctaaaccgatgaaaccaaaaatcttagttacgcggaagttcttagcagaaccgtcaagtttaagaacagaaacttgatcaccgatcttgattgtcccacgagaaacgcggccaatcccaatacggccaacatagtcgttataatctaacattgccacttggaattgaagtggttcgtcactattatcaactggtgctgggattgtatctaagattgtgtcaaagatagggttcattgtatgggcttgtgtatctaaatctgattcaagacttgatgtcccgttgatggcacttgcgtacacaactgggaattcaagttgatcttcatcagcaccaagttcgatgaataattcaagcacttcatcaacgacttcttcaggacgagcgcctgggcggtcaattttgttaatcacaacgattggtgttaaatgttgatctaaagccttcttcaaaacaaaacgtgtttgtggcattgtgccttcaaaagcatcaacgactaataacacaccatcaaccatcttcatgatccgttccacttcaccaccgaaatcggcatgtcctggtgtatctaagatgttgatttgtttgccgttatatttaacagcagtattctttgaaagaattgtgatcccacgttctttttcgatatcatttgtatccattgcacggtcagaaatttctgcgtgaccatccaatgtatctgattgttttaacatttcgttaactaaagttgttttaccgtggtcaacgtgggcgataattgcgatattgcgaatgtcttctctttttttcaagtgtttcagcttcctctcgctagtgacttgactagtgttgtttgtctcatgtatacaagctattattttaccataaaaaaatgggctgtgcttcatatattagcgtttttttgaaaatacgcaagtttttttcatgaaaatttaattatctttaatcatttgaaccattcataatcgtgacaatttcttgtgttgcttgctttggcgcgataatcatcccttcttttcgcatcatggaaattggttgaccatcaaattgtaaaacttgaaaacctaacgtctcagctaaaacccgacctgcagcaatgtcccatggcgctaatttggagatgtaagcttgcacttgccccttcaacaaatgggcgaaagtgataccggcgctaccgtaaatccgcacacccgaacattgatacaacacctcttgcaagtgtgcttcattggtgaccagcatccgtgtattgacacagattaacccttcttgcaacggctcgtcgacagcatttttgagggcagcttcgttttcgaatattcccaactgtggaccgccccagaacaattgatcggccatcacatcataaataatcccgaatagcggctgaccgtcttcataaacgccgatcataatggcgaaatttgcccgttgcttcacgaaattcatcgtgccatcaatgggatcaataaaaaaagttagtccctgttgccaatcatcaggcacctcaccggcaccttcttcccccactaattgcgcgttcggataagccgtcttaatcttttcagctaagaaagcttgattagcacaatcgacattagtcactaaatcattaggcccagacttagtactaaccgttaatggttgtttaatttgtgtgcgggtataggcagctgcttcaaggatccacttttgcagcgaacgacttaaccgatacaatgcttcttgttccattttttcatccactttcactaattaagcgtcattttgatttgggttcgactactcctctttgcagcctgcatacaccgatatattgaatagcctgacgcttctgaaaaggccttatcaatttttttttcttgcatcttactttgaacaaccactttgaagtcacgataagcagcttgtaaatccgcaactttcgcaccaaattcataagcttgttcaacaagattatataatttcatgacttggacaacttcagttggcgtccagtctggttctaaaggataactatagttcgtttgcataaaggctcctaaaatttgcataaatttgcgccagtttcaattctactgatgccattaatctctcacattataacgcatttttttagaagctgtcgaatccttttagaaatagcggaatcaaaaaacgacgcactaaactggtgcgtcgtcattctaaactatttattaaatatgaattggcaatcctaatgctaattcggcatcgtccataatcgcttcacttaacgttggatgtggatgaatggttagagcaaggtcttctgcattcatgcctgattcaacggctaacgtcaattcagaaattaaatcactcgcgccaacgccagcaacttgagcgcccagaactgtgttgtcatccgtattcgtcactaaccgcacgaaaccttctgtatctgctaatgataaagcacggccattagctgcaaatgggaacttaaatcctttagcgttcattccttttgccttggcttctgcaaccgttaaaccggtcgttgccaattcaggatctgtataacaaacagctggcattgcgtggtaatcaaccgttactttcttaccggcaatggcttctgcagccactttagcttcataacttgctttatgcgccaaagctgctccagcaacgatatcaccaatcgcatagatgcccttaacgttagtttggccttgttgatcaacttcaatcaaaccacgatcagccatcttaataccggcttgttcgagtcccatttcgtcggtatttggccgccgaccaacagtcaccatcacgtaatcggcaacaagttgttcttctttgccgccgacttcatatttaaccgtcacattttgatcagtttcaacagcttcttttgccattgcgccagtaatcacatcgacccctttagctttgaagttctttgtcaccaattgcaccatatctttttcgaagttaggtaaaatcgagtctgtcccttcgagaatcgtcacatgtgcacctaagttggcataggcccctgctaattcagagccgatatagccaccaccaatgaccactaattcttttggtacttccgttaagcttaaaccaccagttgaatcaataacgcgtttattaaatttgaagcctttaatttcaattggacgactaccagtagcaatgattaaatttttaaaactgtacgtttgtgcactctcttctttaatcacgcgtaagctatgttcgtccactaaaaaggctgaaccgtctaacacatcaatcttgtgttttttgaacaatattgaaatgccaccagttagtttttcaacaacctcatgttgtttccagtcttgcgttttcgcaaaatccaatgttgctccagtagtcgtcacaccaaagacagatgaatctttcgcctcttgtagtcgatgaccagctgaaatcaaagccttggaaggaatacagccgacgtttaaacaaacaccgccaattgtttcacgttcaatcacagttactttttgacccatttcggccgcgcgaattgccgcaacatagcccccaggacctgaaccgatgactactgtgtctaattcaattgcaaaatcacctacaaccattttaaaatcatccttccatcaataatagctctggatcagctaataattcttttaattcgttcatcgcacgttgcgcagttccaccatcaattaaacgatgatcaaatgatagtgataatttcaagactttgccaacagccaactcaccatcagcgttgacgattggttctgtcccaattcggccaacccctaagattgcaacttcagggtagttaacaaccggtgtaaaccaaccgccaccaattgatccgatattactgattgtcattgaaccaccactcatttcagctggtttcaatttgttatccaatgctttttgcgtattttcgccaatttctttagcgatggcaaaaatactcttgctgtcggcatccttgatatttgggacatagagcccgtgatcagtatccgttgcaattccgacattaatgtagtgtttataaacaatttcgttagttgcatcatcaattgacgcgttcaaagttgggaagtcacgtaagaccgttaccaaagctttaacgatgtatggtaagaaggttaacttaatgtccttcttagccgctacatccttgaatttcttacgatgggtcatcaatttagaaacttccacttcatcgaataaagtaacgtgtggtgccgtatgcttgcttgtcaccattgctttagcaattgctttccgcgttggtgacattttttcacgtgtttcccgttctggtgtaacagaggtgtatggtgtcgcagcaactggttgtgcagctggtgttgctggcgacgttggttgttctgctgtctctacagcaggtgctgtcgttgttgcagcgccattttgcatgaagatttgcacgtcttctttagtaatccgaccatgtttaccggtggctggcacttgactgatatcaacatcgttttcacgtgcgaattgtcgaacagatggcatagctaaaatcgtccgattttggtcactaatcgcaactactgcttgactgcttggcgccgttgttttagctggtgttgattctgacgccgtagctggtgcttgttcagcagatgttgccgttgccgaattgtgacctggagcatcaatttcgaccaatacttgaccgacagtcgccacttcgccttcaccgactaaaattttaacgactttcccactaacaggtgatgggatttcttcaactgatttatcattttgaacttctaataaagtgtcatcttcttgaatggtatcgccttctgcgaccgcccatttttgaatttcaccttcggcaatcccttcaccaatatctggtaatttaaattggtaaacaccacctgcatcggttgcagtcggtgctgcttcgggtgtagcagctggtgttgccgtacttggtgtatcgttaccttcaacacctggtgcgtcaatttcaaccagtacttggccaactgttgccacttcaccctcaccgactaaaattttaacgactttcccactaacaggtgatgggatttcttcaactgatttatcattttgaacttcaagtaagacatcatcttcttgaatcgtgtcaccttctgcgactgcccatttttgaatttcgccttcggcaatcccttcaccaatatccggtaatttaaattgatatgccatacgtctaacgtcccttctttcgttatcgactaaaagttaataacttctttaaccttattttcaatatcagttgcatttggtaaccaagttgcttcagcttgtccaaatgggaatggcgtatcaggagctgaaacacgtgcaattggagcttccaatgaaagaacagcacgttctgaaatttcagaagcaacttgtgccccaacgcctgcttgtttttgtgcttcttgaacaataacgacccgccctgttttttcgacagaggcgataattgttgcaacatctaatggtgcaattgttcgtaaatcaattacttcagctttaatattctctttagctaggttttcggccgctttaatcgcttctctcaccattgcaccgtaagtgatgattgaaacatctgtcccttcagtaaccacagctgctttatcaagcggcactgtataagattcatcaggtacttcttcgcggaacgaccggtataatttcatgtgttcaagatacaaaacaggatcgtttgaacgaatcgcagaaatcaataagcctttggcatcatatggattacttggcacaaccacgcgaatccctggaatttgcgtgatcattccttcaaagttatctgaatgtaattctggggtatgcacgccaccaccaaatggtgcacgaatcgtgattggcatgttgcgtgtgccacccatccgataacgtgtccgtgacatctggccagcaatcgaatccattgtttcgaaaacgaaaccaaagaattgaatttcaggtacagggcggaagccttctagtgctaaaccgattgataaaccaccaatcccagattcagctaacggtgtatcaaaaacgcggtcttcaccatgtttagcttgcaacccttcagttgctcggaaaaccccaccgttcttcccaacatcttctccgaaaatcaagacgttcttatcatctgcaagttctaaatccagcgcatttgtaattgcttgaatcatcgttttttgtgccatcttaattcgactcctttgcactgtattctgcgatttgttctttaatgttttgtggttgatcttcaaatgtaacattcaagaaatctgtgactttttgttttggcgcagcatccgcttcgttgatggctgctttaatgtctgttttaacttgttcgatcaattggtcttcttgatcttgtgaccaaagtcccttatcagttaagaaacggcgcattctaacgagtggatcacgtttcaaccaaatatcgtctgtttctttggtccgataacgagtgggatcatcccctgataatgtatgtggtccataacgataggttaatgtttcaattaagaccggtccgttaccagcagttgtaaattcacgcgcttctttcatcacttcataaactgctagtggatccatcccatcgacttgaatggcagaaatcccagctgcgacccctttttgagccaacgttacagcagctgtttgtttttcacgtgggaccgaaatcgcaaagccgttattttgaacaacgaaaatagctggtgctttaaaagcacccgcaaagttcaagccttcatagaaatccccctgtgaagtcccaccgtcaccggtataaacgtaaacagcattttctgattggcgcttcttcatcccaaccgcaacacccattgcttggatgtattgcgcgccgataatgatttgcggtggcatcgccttcaaagattctggatacttgttaccgtcaatatggcctcgtgaccataggaatgcttgtgataaaggtagcccatgttgcactaattgtggcacatcccggtaaccagggaataaaaagtcgtctttagtcatcgcaaagttacttgctaattggctggcttcttgcccagcagttggtgcataaaatcctaaccggccttgacggttcaaagcagttgctcgttgatcaagcacacgcgaccaaaccatttgtttcatcagttcaaccaattggtcatcactgagatccggcatcaattccggattaacaacctggccagcctcatctaaaatttgaacggtcttaaaatcttggctctcatcgctcaataactcctcaaaattaactgcagctttattattggccatagtatccatatctcctctttaaaaaactgttttaataactgcttatatctgtattacttaagcatctttacaagactaatttagcatttcacatcactaaatgcaagcgttttataagctatattagtcagcttacgctttcattagtttttattacatgtgaacctaatcactagttagctaattttcacgtctgttctatatctgttataatttaatttcgttttctgttatataatagcaaataataagcacaaaaaaagagtccgccgtagcagactcatcgttaaatttaagttggggtagttctatgccaagaccggttggggtatctcagcgttgccagcatgcactaagagctcttgaaacactctgactactggtttaatttgttgactgacttgcacgcaccgttcacttacccgcaaatcatttaaatcaatcgtaaccttaatttgaccaaggttgactaacttaatcattgttagcaggattgccccgacaaccaacgttgccaagcccatgaaagcgaattgattaaccattaatactgcacaaaacgaaaccaatgcagctaccgccatcataaaagtgcttcccactctaactttaggtgtttgtgctttagcaccaatcgttgcatctagcacaacaccgtgcaccatttcagtcactacctcgcccgcttcaataacgttaacatctttgttaactgttgcgattgtaacgggtgtcttttcgctagcagccaatactaaaatatcaccgggcacaatttgatctgcaccgattaagcgtaaaaaaccatcacgcataacgctaacccgtgcttgtgaattttctaatactgcttctcttttagcagcttcgacagttgttaagccacttggccgagttgccaataaacgcattaacatcccactgcttgtaatgccagtgatgttaacgtctttttttaatttcttgtgcatcgcgttcgacactccttcccttttgaggaagtcgtcgtaaaccgctagcctaatgctggcagtaaaatgacagaccacctcgaatgatcaccatcgctactacttacaggtccttcagctgttttcatcattttactcaccagactttctctactttaaatttagtcataccgctttatccgacaaaaaaagacgcacaacaattgagcgtcatccatttatcatggcgttcccaatcgttcagttttagcactatatgacgtagaaaccatgttcagctacgttagaaaaagccttcattggcagtttcagttgactcaattggcatctctcgatgtttctgagtagcagcgtttgttcatataggagcctcacctaacggaaaagcaatatatctatactcttatactacccgtttcactttagcaggtcaagcaattcattccgttttaacttgaattgtgctagaataatgaatgacgaattaatcggaggtcttaactgtgatattaatgaaagatattatccgcgagggtaacccaacacttagaaaaatagctgaacctgttacttttccgctatcagatgaagatcggcaacttgctgctgacatgatggcatttttagaaaatagccaggatcctgaacttgctgaaaagtaccacttgcgcgctggcgtcggtttagctgcaccccaagtagatgtttcaaaacaaatgtctgctgtcttggtccctggaccagacgaacccatcttcaaagatgtgattatcaaccctaaaattatcagccactctgttcaaaacgcagcacttgctgaaggtgaaggttgcttatcagttgaccgcgaagtgcccggctttgtgccccgccctgaccgtattacactacgttaccaagatttagacggtgaaagccacaagattcgcttaaaaaactacccagctattgtgtgccaacacgaaatcgatcatctaaatggcatcttgttcttcgatcacatcaacaagcaagacccattcgcagcaccagatgacatgattattattgaatagaagtgcgattggttgtgcttagcaactgagcattaatacaaaattggcagttatcccacaattcgggataactgccaattttagattaaacgggagttgttgcacccaagcgcacgttaaagaagaagtgctgattcgagttggtcaggctttgaggcttaacggtaaaggctactcgagaagcacataaaaaagcgtgattgaaatctcattagaagatttcgatcatgctttttttatgcttccgccgcttcaggcgtatcggcaaattgactgttatataaattagcgtacacaccgccggcagctaatagcgaatcgtgcgtcccttgttcaacaatttgaccatggtccatcactaaaatcaaatccgcgtcgcgaatcgttgagagtcgatgggcaatgacaaaactcgttcgcccttgcatgactttttccatggctttttgcaataaaccttccaatcgggtatccaccgaactagttgcttcgtccaagattaaaatcttaggatccgcaatcacggctcgggcaatcgtcaatagttgtttttgcccaagcgaaacgttgcttgcttcttcatcaatcgtcatttgatagccgtttggcagcgtatggataaaatgatcgacattagcggttttagccgcatcaacgacttcatactctgtcgcatcgagtttcccgaaacgaatattatcggtgattgaagcatgatataaccaagcatcttgaagtaccatcccaaattgggaacggacttgttgcttgcttaattgctttgtgtcaaccccatcaatccgaatcgttccagatgtcacatcataaaaacgcatcaacaggttaatcatcgttgtcttcccagcaccggttggcccgacaatcgccactttatcacctgggttagcagtaaaactcaaatggcgaatcaatggtttgtctgggttatagctgaaactgacatcatcaaattcaactttaccttgaacgactgctggcaacgatgctgtttcattatcggttgcttcaactggctcatctaagatttcaaatacacgaccagttgcagcagcggctgattgaatcacaccagacaactgtgtaatctgtgagattggttggttcacttgccaaatatattgaatgaaggcttgtaaattaccaactgaaatcacaccgtgcaagacataataaccacctaacgttgccatcccggcatacgtcatgtttgtcgttaaaccaactaacggcatcatcaagccagaaacaaaggctgccttaaagccatagtcagttaaccgatccgtaatttctgcaaaagcagcaattgcgcgttcttcttgtccgtaaagtttcaagacactgaagccgccataattttcctgtacaaagccgttcatttcgcccaacgtgtcttgttggcctataaagtacggctgcgatttctgaatgacccgtcttgaaatcaataacgatgctggaatcattattaatgataagagcgccatccaaatattaatcgtaatcatcatgatcacggccgtgatgatccctaagatcgatgtcacaacttgaattaaactctgttgtaaagcgttcgtaatcgcgtccacatcgttggttacccgtgacaagatattcccttgttgttgtgaatcaaaaaaacgaacgggtagcgcattgatttgcaaatcaatgtcgcgccgtaaatcacgcatcgcccgttgaacagcccgcgtcatccaaaacgagcctaaaaacatcgtcacttgatatagcaacgcaaagctcaaaatcatcgcaatcaccttcgcgatataactaaaattaatcgcaacgtgttgtgctaaactccgactgatttcagtaatggctagtcccatgatcactggccacagtgcattagcgagcaccgaaataacagttgcggtaatcgcaagccaaaatgtcacttgatacggcccaatgtagtgcattagccgtttaagttctctaatattcttcattgagttcctcctgtgataactgtgatgccgcaatcgcacgataaatctcgttatcttttaataagtcgcggtgagtcccaataccaaccacttgaccttcgtttaagacgacaatccgatcagcattcatgatagtcccaactcgttgtgccacaatcagcactgttgcctctttggtgattgacttcaatgcacctcgtaacgccgcatccgttttataatccaatgctgaaaaactatcatcaaagatataaagcgcggggcggcggacaatcgctctggcaatcgccaaacgttgcttttgaccaccagataaattgctcccaccttcggctaaataagtttgtaagccgtctggtttttcagcgacaaaggtatctgattgtgcaattttcaaagctgtccataattcttcatcagtcgcattcggattaccataacgcaagttttccgcgattgttccggtaaataacaccgctttttgtggaataaaaccgatcttttggcgcaacgccttaagttgatagtcgcgcacatcatgaccgtcaagcttaatcgatccacgtgttacgtcaaaaaagcgtggaatcaattgaatcaacgttgacttaccactcccggtactcccaataaaggcaaccgtttcacccggatgcgcttggaacgtgacatcccgaacgactggactttcagtcggacctggataagcaaaggagacattatcaaacaccaattcaccttgtgtgtcggttgttgttaccccgtcttctttttcggtaatattaattggcgcattcagaattttttcaattcgttctgctgaaacagcggcccgtggatacatcatgaagacactggcaaataacataaatgaaaacagtacgtggaaaatatattcaataaacgcaatcaacgtcccaaccgctaagtgaccaccatcaatctgaacagccccttgccaaatgattagaacgaatacgatattaaagatgaacgaaaagcccggttgtgctaaagccaccaacgtaaacagccggatagaactatgactgtagtcatcattcacttttctaaagcgtaatttctggaattgttcccgcacaaaagcacggacaacacgaatcccagtcaagttctcacgcagattcagattaatcgcatccagatttttttgttgttccgtcgacatcggttcagaaacgcgaccaatcaagacaacccccgctagcaggattggaattgccgcaaatacaatccatgagagcgattgacttgtccgtacaatcatgaaagcactcgcgacgatcatcatcggggtcataaaccctgtccgcaacacttgggtcataaattgcatcacctggaaagcatcattagtggtccgagtaatcaaagaagacacaccaaattcgccatactcactatgggaaaactgcatggtttgtttaaaaatatcgttacgaatgtcacggacgatattggtggttaatttgctaccagtataagccaagccaattaagccaattagtccgattaaacagattccaaccatcaacaacccaaattgccacacagaaccaaaggtatgttgattaattcctttatcaataatttgtcctaataacgttggtaaccccaattcgattagaataaatccaaatacgcaaataaagttccaaaatagtaatttcttatatcggatcgtatagcgccacattaatttcatcggtgcaaactccttctaaacttcaaatttaatcttctacctgtgccatatctttaacatactcgattgtttcgcgattgacaataaaagcaacgtcaaaatgcaattgttcttccaaaaaccacacatcagtgactagcaaagccggataacgcggactgacggaggcaatccgccgttcgtaagccacttcattgagttgttcctcaattgcggctgccacatcctttaatgcagatgatgtttgtcggatgggcacttggtattcgaagaccatcacattattgccccaaatttcagtgggcaggttcgaaaccagtttggcttgcggtgcataaaaatccggctgactcgcttgcattttttgataagccaccgttgcaatttcatccgcaatttcttgactactgtgttgtaaaatccgcgtcgctctttgtcggcgtaaccgtttaatcaaccaggttaaaaaaagcgctaacgcgacaatgataacgactgacaaccaaattaacataacaatcccccacttctattgctcactaatatgataattataaccgaatcgaggcaaacacgctatttagagcacgtcgctcaatgtatactttaccgaaaagatatgctaaaatattcttaaatgttgagtaatcaacccctggacggttaatctttcgtttaaaactatgatgaataataaaggagttttacaattgatttataaagtacttttccaagcagacaaaacccaaagccctctacgcgaggcaactaaatcgatctatttagaagcagacagtgccgttgaagcacgccaacttgttgaagacaatactccctacaatattgaatttgtacaagaattatctggtaagcaccttgcttttgaacaagaatcagaagattttaaattaacggagttttaattaaatgaaactcgatattaagaataacgaaaccgccgttttcgccgtagggggacttggtgaaatcggtaaaaatatgtatggtgttcaattccaagacgaaattattgtgattgatgccggcattaaattccccgaagatgaactcttagggatcgattatgttatttcagactatcaataccttcaaaagaatcaacaaaagatcaaagccctcgtcattacccatgggcatgaagatcacattggtggtttaccttacttcttgcaacaagtccctaatgtacccgtctacgctggtccattggcacttgccttgattcgcggtaagttagaagaacacggccttttgcggtcaacagaattacacgaactaaacgaagataccgtccttaaattccgcaaaacaagtgttgatttcttccggactacccattcaattcctgatactttaggggttgcgattcatacacctcaaggggtaatcgttgaaactggggatttcaagtttgacttgaccccggttggtaatcaaccttcccctaatcttcaaaaaatggcacgtttaggtgaagaaggcgttttatgtttaatgtctgatagtaccaatgccgaagtaccaaactttacaaagtcagaacgtttcgtcggcacttcaatccgccatattgtggaacgcattgaaggtcgcattattttcgcaacgtttgcttctaatatttcacgggtctcacaagccactgatgctgcgattgctaacggtcgtaaaattgccgtctttggtcgcagtatggaagcagcggttgtcaacggtcgtgaactcggttatttaaatattcccgatgaagctttagttgatgccaatgaattaaattcgttgcccgccgacaaagtgatgattctatgtacaggatctcaaggtgaaccaatggctgctctaagccggatcgccaatgggactcaccgtcaaatttcaattcaacctggcgacaccgttgttttctcaagtaatccaattcctgggaatacaatgagcgttaaccacgtgattaataagctttcagaagctggtgctgaagttattcacggtaaagtgaataacattcatacgtcaggtcacggtggtcaagaagaacaaaaattaatgctccggttaatcaaaccgaagtacttcatgccttgccatggtgaataccggatgcaaaaaatccatacggaactcgctcaacaatgtggtgtggaacctgataactgcttcatccttgaaaacggtgacgtcttagcactcacttctgactcagcacgggttgctggtcactttagcgccgaagacgtttacgttgatggcaacggaattggcgatattggcaatgtcgtgctccgcgatcgtaaaatgctctcagaagaaggtttggttgttgttgtggcaactatcaatcttggtgaaaagaacattctcgctggtccagatatcctctcccgtggtttcgtctacatgcgtgaatcaggtgaattgattagcgaagcccaacgccgagttttccgaatgatcgtcaatacgtttaacgctaacgacaaggtcactgaaaaccaagtccgcgaagcaatcattgatggcttacaagacttcttgtttgaaaaaacagaacgccgcccaatgattttaccaatgatcattcaaagtacagaataataagttttgcgccaggtcaatatatgacctggcgctttttttattgtttaatgcaagtttttattgtcaacatttggtaaaaaccgctataatatacaacagattactttttctgaaaggcggcttgttcatgccctccaatccccatttttacatcattttaaaccaagttgccggtaccggtcaggcagcgagtatctggcctaaaattgaaactcaattaaaacaaaaaaaaattcactatgaccttcaactctcccactacgcaggtcacacgacccaattggccttccaatttgcaaagtttaagtacacggatcaaattttattaattattggtggagacggcacgctcaatcaagccatcaatggtctccagaatgctcagcgcggcgatattccgattgcttacattccttgtggatcgggtaatgacttcgcccgtggtgtcgggattagtcgtgatccattgaccgcactcgaacaaatcttgtcggccacaatgccaactgccatcgatttaggttattatcatgacacaacgaagaacgaccatggctacttcgttaacaatgtggggattggttttgatgccaacgtggtcagcaccaccaatcattcaaatcataaacgacttttaaatcgattgcacttaggctcattagcttacatcagctcattggttaaagtttttatgcaccaagatgcgtttgaagtcaccgtcacggctgatcaccaaaatcattattttaaacgtggctttttagtgaccaccactaaccatccctactttggcggaggggtccccatcatgcctagcgcaacggtcgacaaccatcaacttgatttaattgtgattgaaaaattgaatccctttttcttttgctatctttttgtgatgatgttgtttggtcggcacacacgctatcaagcggtgcatcactttgaaggaaccaacttagcgattcaaataaaaacattagaattcgggcaaatggacggtgaagaacttggtagccggacatttgatattcactacagtcttaaaagccaggcattttggctaaagaagcaagcataaataaaaggcgctgcctccaagttgggggcagcgccttttaacgcgctcttcaaatcatgttcctatgcctagcaacacaaggctagtgcacaaaagttgaccaaacttgaatgcactcatttctttagaagtaatccgagaagtatggttggtccattggaataatattctcgagattttttagtgcttgtcggttggcttgtagtctttcaatctttgccaagtatgatgggcgtcgatagctcatcagcattgttgttagtgtctggatgtcgcattgaattcgttcaccgactgggcgacttgtgacctgcacttttccttgttcatcccaataaacgccaaacgtaccgttattccattcagctaatggatcggtcaattcaatgtggaatgcttgcccgtccgtttcaaacggataagccaacaagaattcacgcacatcaacaatccgcgccataaaatatggcttaatcgtctggtcaatatcaccatcttctaataagaatgaaatcggttcatcctgatattgattacccttgacatgttcaatcattgaataatgcgcgccaatgaagttccacagaccaatccgggcttcttgattaagataaatcatttctttaatatggaagacttcgttggcaatccagtataaaacatagccggtgggttgttcattttcatcataataaacaccagcaatccgttcttcttcattttcccaacgccaatattcatcccagttcagttcgttacgaatcattgcaccgtgattttttagtgcaaaccgttgatacgttttaatcacgtcttcatcgtcaatatcaaggcgttcaacgtgcccatttaccggccgttgcttaggtaattggctatcacgaatatcataagttaggtgatcagacatgatctcccaccctttcttacgataaaacggaatgctgtatggatataaatacgatatccactgcttattctcacgcatcttgttcaagccgactttaaccaagtcatgcatcaaaccatgaccggcatattccgggtaagtcccgacaccagtcaaaccacccatgttaaatacctggccatgaatgttcacgcagcaatgatagatggctaattgtgaaatcagttcgtccccattaaaccatccgattacgtcagatttttctaatacgggacgtttggcgcgttctaattcgccctcttcgtagccactatcagaaacttcctgatcggtgacttgaaaaacataccgtaataagtcattaaattgttctaaatattcaattgtcacgggtctaatctctaaattagatcgctggtcaaccattgtttcgcctcatttttcgttagttgtttaccctattatacactattttgatttcggcataaaatcgtacggtgtcaccccggtcatcccaatcattggatccacttgctgttgcgttagaacagtcggtgttaagacataactgattggcgtttcttgtattgcgtcgtcgtcttctggcactaagttcagttgttcatcaacagccgtttctggcgcacttggtggtgccggctggtcaacaattgttttggcttctgtctgccccacactggccgtcttaatggcggtgctgagttgttcaccgttaaagacactttgaatccgttcttttaacgtcgtttgccgattggccgaaagttcctgagctgctttttggaaagcactcggttcaccaatcagaatcaacaatgatttagcccgcgtgactgctgtgtacagtaagtttcgcttgagcattcgttggtattgattgaccaatggtagaatcaccatttcaaattcagaaccttgcgccttatgaatcgacgtacagtaagccaatgtaatcttgtgccactcactccgcttataggtcacttctgcactatcaaaagcaatggtgatctcgtcaaccttgtccgcactctttttagcataggtaatccccgtaatctgcccgatttcaccattaaacacattttgttccggactattgaccagatggagtactttatcgccaatgcggtagtgaacgttaccaatgctaacttgttttttgcggtcatctagctttggattcatgatattttgaatcatcgggtttaactgatcaattccggctgctcctttgtacatcggcgctagcacttgaatgtccttagtttcaaaaccacgcgctttggccttagtaacgacttgttcaatcaccgattcaatttgatacggattacattgaatgaaactgcggtctttttgcggcttcaacaaatccgctggcagttggccttgattaatttcatgcgccaacggaataatcgttgactggtcatcttgccgataaatacgttgtaattcaaccgctggaataaccttactctgcaataaatcaaagaaaacttgccctgccccgacggatggtaattgatccttatccccaaccaatacaacctgcatatgactgggcaccgcccgtagtaatgagcgaaacaagtaagtatcgaccatcgacatttcatcaataatcaataggccgccttccaattctttgttaccggaaacatctggattattttcgcggccagtgattccgagtaagcgatgaattgtactagcaggcaaacccgttgtttcactcattcgttttgcggcccgacctgttggagcggccaataaaatcggaaacggcgtgtctttgtactcattaatatctaatgacagcccgtttaattcagcgtataacgtcacgattccgttaataatcgtcgttttcccagtaccaggtcctccggttaataagaacgcccggtgagtcatcgcaagcttaatcgcctcttgttgtacgtcatcgtatgtcatcttaaaccgtttttcgaggtggcgaatttcttgatctagatcatgtttaggatagctaagttgatcgcgttcattttcaattcgcattaaatggttcgcaatttgccactccgcattaaataacccattcggataaatccgattctcatcaccaacgactttcccatcatgtgcaagtgccatcagttgttcagccaccaagttcggatcaatggcaacattgcgtgctttttccatcaactcaatactagctgccaataacggcttggcctgggtataggtatccccagcttgattggtcaactcatttaacgcttgcattaaagccccttgcacccgcacggctgaatcagcggcaaacccgagggtctccgctaaattatctgcacgtttaaagccaatcccagcaatgtcagccacgagttggtacggattttcttggataatcttcagcgtatcttcatggtaggtctgatagatgttataggccatcgagctcccaaaaccatagttgtttaagccaataataatctgttccatcccattattaatcgtcagcgtttcaacgagttgtgcttgtttcttcgcatttagccccaatggttctaacgccgtcggatcctctaatattttatcaatcgcgtcaattccaagagtatccacgattttttcggccgttttctgcccaatgcctgtgaatttttcgccagacaaataagcgactaagccggccttagtcgttggttggtccacttggtaattatcggcttgaaactgtttgccatatttaggatgagtgaccactttgccatagaaggtatatcgttcatcttctttaatgtcgccaaaactcccggtcaccacaatttctgtttcgtgccagtcaatcgtcttatgtgctactttaacgagtagaattttaaaaaaattatccgggctctcatagaaaatactctggacggttccggtgactgttggtttggtttcgtctgtttttgctatatccacaatcgccatcccttattctttttgctctttagcctgcatgaagccttcaatatcaattaactgttgtttattctttttaaaataatccggtgcatagtgcttggcttgttcgaaataaggctcactatcagcgcctaagaccagttgcgtcaagccatacttaaataatacttcaccattttgaggtgcaatggtcaatgcctttttaaggtaggtctgcgcctggtcaaaatcacccaagctcgttaaaatatcgcccactaaaagattggcgtctagttggtctggttcttgttcttgaacggtcaacgcgaacgccaatgcccgtggattctgttcgagttgatgatatgtctgcgcaagcatatactgcgcatctgttgattgtgagtcttgcaccaactgcatgaacaagggcaccgcttgttgataagcttccgcttgataatagagtgttcctaatgcgtaagtcaatgcagcttcattatgaaattgcgtcaacgctttttgcaaaagtgcttcagcttgttcaaaatctttaagcgtcgttaaaaatgtcgcaagggtaacgtaagcttcaatgtcttctgagtgatcttgtaaatattgtacgagatctttaacagcggcttcgtggtcgccagcggcccattttgctagaattgcttgcacgtgatcatctcctatatcgtatctgttgcggataattgcttgctgaggaagtgtgtatcattccacttaattagtttgaaagatgctccttgatcgtcagttgtcatcgtggtcacagatgaatttgtcacaccgccgtctttgcggacctgagccaatggcgtcttgagtaaggactgcatcatcgccaccatcgctgccccatggctgacaataataatatgatcagtcggtttagcggccttcacaattgcgtcaattgcctgcgtcgtccgttcaatcacttgttcaaaggtttcccctttaatctcagttggatcatactccgctggtgcttcacgaaaggccttcacgattgtcggatattgtttttcgacttccgtaaagcgcattccttccattagaccgagattaaattcgtggagtgcatcaacaaccgtaatcggaaaatcctgccctaagtctcgttttagcgcagcagacgttacctgtgtgcgttttaacggactcgtatataaatgatcaaaatgaatgggctttaaaaatgtggctaattcttcaatttcaacgtaactactgtctaataatggtgaatcaccgcgtgcaccttgatagcggcctcccaaattccattcagtcttaccgtggcggataaaatataaggttgtcatgcgttctctccttaaaataacttacttttcattatgaaagagttacgccctaaattcaagtcaatcgactaataaagcaagcatttttcctgtaaaacgccatcaaaaaaaccgctaggataaaaatactttttatcctagcggtttcatctattagttgctctaaacgtgtttcagtaggcatatttctgcggttaaccctatttgccaaatccagttaatcctcaaaatatgaacgcttacttacacactcttttatttactttctgcgacagcttgcattgcaattgcgttgacgtagttgactggttgatcgtagtttggttggaagaacatgtcaaccattgctaattgatcaatcgtcatcttcgtttgaatggccattgaaatgacgttcgctgcttgagcaatatcatacatacttgtgaatgaaccacccaatacttgacgcgtcttaggatcccacattaagttcatcaaaaccggtgtcgttgatggcatgaaatcagggcggtaatcttgttctaacgttgttgtagcgacttcaatcccacgcactttcgcgccttcaactgttaggccactccctgaataggtgcgaccaaataattcaacggcagaagttgcttgcgtgcccatgtacttttcagttggtgtttcgatgttgcggccgattaaaaggccttggcgaacagcgttggttgccaatggaatgtaatctgctttttgtgttggattgtaatgaacagctgctgaatcgccggctgcataaacatccttaacagacgtttgcatgtattcatccgtcaaaatcgcaccgttacctaacatatcaacttgccctttgaaaaggccagtatttgggcggaagccaacacataaaattgcaatgtcggctgtgtattcgttcttatcagttttaacagtgacttgatccgtccctgagaaactgaccactttttcgctaagcgcgagggttacaccgtggtcacggtaatcttgttccacgatttctgagatattaggatcgaaattcttgccgagtgcgtgtggtaatgcatcgattaatgtcacttgcttatcagttgttgcataggcttctgccaattcggcaccgatgtaacctgaaccaatcacgataacactcttcacatctggggcgctcttcttcaattcattggcatgcgcccagtttttgcagagcttaacgttcggattgtcaatgccttcaattggtggaatcacaggggatgagcctgttgtgacgatgattttatcaaatttttcggttgtttcttcttccgttactaggttcttaacgcgtaatattttttgatctaagtcagcttctaaaacagtgtgttgcatcttcatgtgagcgcccgcttgcgctaacatttctggatttgaatagaacattttctgaggatcggctacatggccgcccacccaaagggcaatcccgcatgataagaatgataaattatcgtgtgtttcataaaccgttatatcccaatcaggatgttctgccaatgttgcttgtgttgcaaatgtccctgcgtgtgtacaaccaataactgctactttcatcatgttacctcctagaaatatccaaaaaacgacggttaatcgttgagaatttgtgaaatattacgcaaccagcatgtaactatattgtacgctacttagtttctaaaagtcaattgcctccagctattaaattaatttcacaatctaaaacgaataaccacttatgttttaaacgttatattgtgattttattctaaaaaaggtcgttgaccacttattgaacaaacccacaaaaaaagtgctgataaatataaattcatcagcacttttaacgattaaattagatatattgtaatactttcatgtcagcatcatcgttcgcagccttataagccacgtcaatcgtgccgccacctaaacattctgcgccgtcataaaagacaaccgcttgaccaggagtaatcgcacgcactggatcatcaaagacaaccgttgcagttgtgtcagatgtcatgtggacggttacgccgacgtcttgttgacggtaacggaacttagccgtcacgtggaaatctgtcccatgatcaactggtgtgatccaagaaatattacttgcatctaattgatcagcatagagtaattcattatggtagccttgaccaacatataaaatgtttttgtctaaatctttaccaacaacgaaccatggatcattggattcgccaccgccaccgattccaagaccggagcgttgaccaatcgtgtagtacattagaccgtcatgggtgcctttttcaagaccgtcgaccgtcatcatcttaccgggttgtgctggtaagtattcgcctaagaattgcttgaagttccgttcaccgatgaaacaaatcccggttgagtccttcttcttagcagttgctaagccagcctcttcagctaaccgacgcacttctgctttttgcatgtgaccgattgggaacattgatttttgtaattgatcttgagaaagagcgctcaagaaataagtttgatctttattgctatcaccgccacgcaacatgtgcgcgatgccgttatcatcgcgttcaatctgagcatagtggcccattgcgatgaagtcagcgtctaattccattgcgtaatctaagaaagccttgaatttcacttctttgttacacatgacgtctggattaggcgttctgccgtgtttgtattcgtctaagaaatattcgaacacgcggtcccaatattctttttcgaagttgacggaataataaggaatgccaattttagaagcaaccttggcaacatcctcataatcttccgttgcggtacagacaccattttcatctgtatcgtcccaatttttcatgaaaacaccaatcacatcgtatccttgttgctttaataacaatgctgtgacagatgaatccaccccgccgctcataccaacgacgactcgtgtattactgtggtcaaccacaatatcaccatcatttcaaatagattctagttttctacgatttgaaggtcgtgaattccagtacttaccattatagcaatcttggttaatatttcaaactaaaacactcacttttcataagttaaacgtaaaaaaagcagtttacctatcaaactcctggtaaaccgctcttaaaacgttatttagccttctttaattaacacttcacgtgccactaagttagcaataataaaattaaattgttcgacgttttcagcattcttttcactcttgaaaatatcgactggatgtaagccatctggagaggtgacagacatcttcaacgtctgtaactctttaccaattgtcatcttcaacttaatcgcactgttaaatggtgaattaggatctaatggccgttccatctggaagttaccattgtttgtgggcacaaagccaacatctcttaatgtgtattttttaacggcgggattgagtcgatattgcaccgtactccccaaaaccgttgctgttgtttttaataaagccatctgcctaacctccatacactgaataagtctattttagcacaagcacgtaaacgctgcctaccccttagcggcttgctttgctaaattgcgtttcacaatcttcgtgagcgcttcggcaaaagcagcgacatcttcgctcgatgtttcgtgaccaaaactaatccggatgctttcggcaacgcgcgggctatcctcaccatacatcgcgatcaacacgtgtgagggttccaaatcgccagcagtacatgccgaaccacctgaaattgcaaagcctgctaaatcaagattcatctgcaagacataggttgaaacacctttaatccagaggttcacaacatgcccgacttgatcagctccttctgcgttcagcgcaaaatcaatgtcgttggcttttaaatcagctagtaattgctgtttgaatccagcataccgtgcttgtaggtctgctttaaccgctggggtcaataattcaactgctttcgcaaaaccagctacagcgggcacattttcagtccctgcgcggcgcttcttttcttgttcgccacctaggacaaatgatggtaaatgaatcgcgtcgttgacatagaggaagccgatttgcttaggtccattgatcttgtgggctgaaactgccagtaaatcgatattgtcagcttgcacatcgatatctaataagccatacgtttgcgtagcatctgtgtggaaccaggcgtttgagtcgcggacaagttcaccaatttcgtgaattggcatatgactgccgacttcgttattgcccatcataatcgatactagaatcgtttcgggcgttaaagccgccttcaaatctgcgagatcaatcaccccttgttcgttgacgggtaagtaaatcacatcaaacccttgcgtttctaaataggccatcggttttaaaacggaatgatgttcaattgccgttgtaataatccgcttgccttctttagcacgcagtttggctgtctgaaggattgccgtgttattactttcggttgccccactcgttaagataagctcgttatctttcgcatgaatgctctgtgccaaagtatggcggctggtatccaacaccgtgtgggcttggcgcccaaaataatgggtgctcgatgcattcccgaaatcggcctgcatctgttcggtcatcgtcgcaatgacctctggggccatgggtgtcgttgccgcgttatctaaataaatatgtttcacaatttttcgcctcattttaaaaagtatctataatagtttaacatagttcgcttttaaagcacggataaacacttttcgctaccaaaaaaggctgggacaaagataccttgtcccagcctttaaaacacttaatctcagattaagcagtcattaaagctgctttttgatctgctgttaatgattcattcatccggccactcttgaaaccagctaaatcaaccgttacaaattcaaaaccaacttgttgtaatgcttggttgatttgttcgctgtgggttaagaagtcagcaatttgtgcttctgggacttcaacccgggcgattgattcgtggtaacgaacacgaaccgttgcaaaacctaaatcacgcaagaatttttcagattgcatcacttgagcaattttggcttcagttaaggctgtgttatatggaaagcgtgaagaaactgaacagctcgctactttattccagttatttaagtttaatgcctttgctaattgacggacatcaatcttataaaaaccagctgtttgaaggacactttctgcgccagcttcgtcacgggcccgtaaacctggacggaagtcgctgttatcatccatgatcatcccatctaaaacgtggtcaaagcctttttcagcagcaatttggttcaattgtgtatagaacatcttcttgctgtaataccatgtttctggtgtgttgttggcaatgtgttcgtcagataagtagttcaatgttgttgtttcgacattcgcgcccatatcatgtgccaagtcgatggctttgttaaattcttcgtctgtgaataattctgagttagcaacgactgctaagacgttttctttgccgagtgtttctaaagccatttttaaaactaatgtgctatcaatcccaccagaaaaggcaacaatcactttttccatttgttgtaaactgacagttaacattgcttttttttcagataatgtattcattgttaaagacttctttctatatcattagattaattgttttaaagctgttaattcattttgaatccgatcggcatacaccaaatcgttgttatctaaactcttgacgatcatcaagtttaaatgcgcggcactatcaacaaagtttttgaaagttgattgactagcggtttgttgcgcgtcatcaaggctaccataaagttgttctgctgttaaaagcgcttgttgcgcttcaattaaactggttgagattgtccccggttgtgaggcatgagcagcgacttcgaataagtcgaccatcatgttttgcgtttgtttaatttgttcacgcatggttgattcctccgattaaattagatgccaaagaaactccgcataaagagtgcggcacatagaccaccaacaaatggtgcaattccgggcacgataatcccgtattgccaatctgagttggctttatttttaattggtaaaagcgcgtgagcaattctaggacccatatcacgcgcaaggttcattgcgaatccggtaggaccgcccatccccatcccaattgcccaaacaagtaacccaactgcgattggtgcaatcccaggtgtcttgatttgtgtaatggcgataattgatgaaatgaaaacaaatgttgcgaaaaattcaacgaagaagttccgtggtaaattccggataccaggtgctgttgagaagatgttacgaaccgcaacaggatcgacattgccttctgatgctttaaattcatcagcgtacatgatatagacgataactgcaccgacaaccccgcccaagacttcagcaactgagtaagggataaacattgcccatgaaacgttgcctaagatacattgtgctaacaccatggctgggttaattgaaacatctccgaagatgaataatgaaactgtaatcccaaacccccatgttgtaatggcaaataaatgacctgagccacgatactttgaacctttgaggacttcatcactgtgaaccccaaccccgaaaatgatcatgagcgctgtgcccatgaattctgctaataactgatgaatcatgaataaattcctccaaataataacgatttaatatctaaattttgatagctttaacgcgttacatcaggatagacccgactcgggcatactctgataaacagcaagataaacttgattaagtgccacgtcatgcgccttggcggcagctagacaatcgtcgaactctggactatatttttcgagatcgtcatagttcacgattttgacccgaatatcgccgaagcgcgtggctacagtgataaaatgacgtggcataatggtgcgccccatcgtctggtaacgcacaccaacagttgctgtgtgttttaagatcagataagtcatggcttgttgatcggctggatgaatcatgaccgttagcttaattgcgggccgatttttcttcatttgaattggactgaaaaaggcatcgagcgccccattgtccatcaataaatccaaaaccggcgctaaactttctgctgactggtcatcaatgttggcctccaacactaaaatctgatcggtatcggttttaacaacctgttggcttagttttttttttcgcacaacatcacgcgtaatgcattgagttgcggtgtttcccgattaccaaaaccatagccgactttaatgatcgtttgatcgtctgggattggacagaattggtcgacaatcgttttgacaatccccatcccagttggcgtgatcaattcggtctgcaagtctgggttttgtttaattggaatcgcactaccgacgcgcatttgcatcacagcggggactggtacgggcatcatgccatgcgcgactttgataaagccactcccatccgttaattcggatgaatagacttgattaactgccaataattcgagggcgacaaacgctccaacaatatcgacgattgaatcaagcgccccaacttcatgaaaatgaacatcacttaatggtaggtcatgaacgaccgcttctgattgcgcaatttctgtaaaaacttgtttggcgttcgttttaacataatcgcttaaatcactgtgatcgatgatggcttcaatgtcttttaaatgtcggacgtcatcaccatggctgtgcgtgtgtccatttgcgtgttgatgcgtgtgtgcatggccagttgcgtgtgtatgcggatgttgatgctgtgccggtgttgtttcaataaaaccttcatccttgtgcatggcttctggcaaatggacgtcaaaatcggtgccataaatactacttttagcaatccgttctgcatgtaggtggtagccagggacattcaacttagctaattctgtttcaaactgtttgaaatcaacccctaaatcgagcaaagcgccgatgaacatgtccccactaattcctgaaaatgcgtctaaataaagagttctcatttgtcatcctccgtgtcacttaaatgattgatcatacttgctgagtagcccgcaccaaagccgttatcgacattgacgacggtaatcccggacgcacaactattgagcatggtcatcagcgctgttagtccgccaaagttagtgccatagccaatactggttggcacggcaatcaaaggtttttcgatcaacccaccaaccacactggctaaggccccttccataccggcgaccacgatgacaacttgggcttggcgaatttcatccaaatgttcaaacaagcgatgaatgcccgccacaccaacatcatagattcgtttaacttgattaccgtatacttctgcagtgaccgccgcttcttcggccactgccatgtcggaagtccccgctgtgacaacggcgatatagtgatccgtggttggtagtgggtcaaccatcagcactacacattgcgccatttcatagtacattgctgtcggttccgcttcttgaatcgcagcgtacttttctggggaaactcgcgtacataaaatattttcggcatgtcgttttaacgaaccaatgatgccaatgatttggtccgccgttttaccggcgccataaatcacttccggatagccattgcgcttttgccgacttaaatcaaccttggcaaagcctaaatcatcaatggtctgcgcatgtgccagttgctttgttgcttctgtcacactgactttttggtttgcaacagcttctaaaagctgttgtagctcatttgttgtgtccaaactactcattctttctattgttatttcacaataacccctaaaccatcagggatcactgtcactttggcatctgccccttcaatctcgtaggcccgttctaacgctgcatctaaactggttgccaattccatatgcatgtctgtaattaattgtggatcaaccaaatctgacacgaaaatcacatgatgttggaccagaatccgagccaagatttgtgatgtccattgatcagggaccgtttcaagccgtggtgtattgattgcttggtctaagaattctttaggatccttaacgtcagcaatattgtgatagaacccatcaccaccatgcccgtcacgtgcaccagcgaccatgataatcacgccaccttgtttgttcgtcgcttcagcagcagtcatccctttaacggcttggtaaatattttgatcaagtggatagccaccatttgttgaaatggcgatatcacaatcgatcttgtcgacttctgataaactttcaacgaagtcacagccttttttgtgcgctgtttctaaattaccggcgaatgaaccgatgatgtgcttgtcttcatctaaaacaacgttcaagatgaattcaagcccagcttgtttagcggcataaaccatatctttgtggactgggttatgcattaaattcccggttcttgaatagtgggaattgatgaattcacctgagtggttggccataattgttttgtatgaagccacacccggtaaaacagacttccgcccgcctgagaaaccagcgaagaaatgggattcaatgaagccttcagaaatcaataagtcagcttcaacagcgactttattgataatgcaatcgccacctgatggcaattgaccgattttcacaactgagctgtcatcggttgaaacatgcatgacgatttcttcatttgcaacgatttcttcaccatatttgttaaccaattcttcgtgcgttgatggtcgatggaacccagtcgcaactaaaatccgaatccgtgcatctggtgctacagaacgaatccgtcttagtaaaatcggcgtgatgatatgtgaaggaactggtcgtgtatgatcagaactgataatcacgatattctttttccctttagccaactcttctaacttagggctatcaatgggattgtccaatgatttttcaaccgtttcggcttcgctcattggattttgatacgtagcagcttgtgaaacaagcttcccggcaaaattcgcgtctgcaatattagccgtgataattttttgatcgtaaggtaatttaatggctaccaaactataggacttcctttctcaatgctgattgaatgcttttttaaagctacgtccatagttatacagattttctgaaaaggatgcggtataatttatgaacaacatttcattattacttttaggtgtaacaaatgataacaaccttatagtcttcaagacgtataatttagattaaagttatttaatgattagcagatataataaatcagcacaaagggtaggcagatgtattatggttttaacagacattgaatttttaattaactttttagaggaacgtcacgtcccagtgattaccaaaaagaagcacacatacttgacgtaccacggtttggaagaacggtatacttatattctgaaaaaaggcgtgattaaaaactcgatcattttacaagacggtcgtgaattcaatctctcttacattacccagccggatgtcatttcacttttacgggatgaaatttcaaaatatacggatcaaccgtttaacgttcgcgttgaaacagaggaagcaactttctatcagattgaccgcgtgaccttctggaactacgtgaatgccacccccgagttacagaattacgttaaaaattactatcgtaaaaaattatccgagaatatttatcgcttgcaaaaaatggtaatgaatggtaaaaacggcgggctgtgtgccttcttatacagcttaattgatctctttggtaagaaacgccgcgatggcatcctgattgacttcgtcgttactaacgaagacattgccggcttctgcggaattagctcgcgcagtagtgtcaatcgcatgctcaaccaactcaaaaaagacggcgtgattgaaaccaccgagcataaattcttaatcaaagatgtcagttacttgcttgataatatcgccaattagcgatttgttaacatatgtaaacatgattcgtgattgaaaacggctatgagacgcgtagccttaatagtcgagaacaaatcagtggaggtttttatgtatgcatattccagataattatttaagtccccaaacgtgtgccgtgcttgcagcggccgctattccagtcattggcttggcactcaagaaagttaaataccaagtcaccgaaaaaaaagaaacggtccccatgttagggatttccgcttcactatcgtttttgatgatgatgtttaacgtgccaattcctggcggtacaaccgcccatgctgttggtgcaaccctattagcgattctcattgggccgtacgccgctagtctagcggtaacgattgcactcatcatgcaggcctttttatttggtgatggtgggattctcgcactcggggccaatattttcaacatggccattatcatgccatttgtcggctatggtctctatcgactattccaaaaagcacaccagcccaaagtgggagtcgtagttggcgcatatctcgggattaatgccgctgcattaatggccggtattgaacttggtctgcaaccactcgttgcgcataacgcagctggccaacccatgtatgccccttatccgttacacattgcaattccagccatgttgttcgctcatttattagtcgctggttgggttgaagccggctttaccctcgccgtttatcaattcatttgccgggttgcacctaacgaactgttcgttgcaccacgtcaaacagttgatccacaaaccagccgtcgtttacatcgcgcgctttacagtttcatcggcctattgattatcttatcgccgattggcctattagctagtggtactgcttggggcgaatggagcgcaagcgaactcgttacacaactcaaacatgatcacctaggtcacagtctaccaagtggtatggcccatggcttaaactttaatgccctctttagtgactacacagttgctggcgttccattatcacttggctacatcttatcagcggtaacagccgtcattgttttttatcttatcggaaaactggtgatgaatcattattcaacccaatcctaaattaccaacttggcttcaaacaacggaagctacgcccaaaacggtcgcgcaattcgaccgttttttaattcaaaatttgcgctttagtgatcgtttgctgcggcgctttaatcaaacaaagcctcaacctttaaccgcccatcaaacgcctggtattcaactgattagtttattggtgacactcatcattctcgtgttaacccatagtctacttttaatttggttgattggtttattgacgttaattcgaatttgccgcttaccaagccagcatttatggccgctttttaaacgcgtcggtgatatcagtatcattgcgattttattaattctaccgaatttttggctcggccaagtcgccacaacgcttttatttatcgtacggactgaaatcatgttattaaatattgctttctttctcgagacgatcacttggcccgcttttattgttgctttacgtcaattaagactccccagtctgctcattttgacactcgaaattagtctgaaatacagccacttgctcgcccaatttttacaagaatccctctgggcaattcggctacgctcaactggtaaaagccaccaacgacaaaatttagtcggttcactgattggccgcctctacttaagttcccgcaactacattaccgctttatacgatgcgatgattctccggggctacaccggacaagtcacccgacggacgccgctaacagtgaatcgctacgactggcgcttaatcagctgggatctagggctattttgcctattctgtttcattcggaggtaatcagatgctgaatttgcaacacattcactacgcctatacgcaaaccgacagccttaacgatatttctcttaccatcgatgcaggcgaggccgtcgcgtttatggggcctaatggttccggaaaatcgacgctgtttaaattaattaacggtttgattcagcccagcgcaggccaatattattttaaagaccaacttgtcgatgcccgcttcctcaaaaagcctgcacaggcgactgccctccaccgcgcaatcggctttgtattccaaaatagtgacgttcaattatttaacgaaacggtgcgcgccgaactcgcttttggtccagaacagatgggcttagccccagatgaagtgcaaacccgcgttgacgattgcctcgcgttgttacaaatcgaacacttagctgatcgcgtcccttatcaactttccggtggcgaaaaaaaactcgtcgctttgggcagtgtgctaacgatgaatcctgaaataattgtgctcgatgaaccattcaacggcctatcagccgcctaccaaacgctgattatccacttgctccaacaactcaatcaagccggcaaagggattttaattgcaagccacaacctggctcaagtcaaacaagtcgctaaacgggtggtcgtctttaatgaagaccatcaagtgacccatgacttaccactcgcaaaacttgaacaagaaccggaactgcaacgaactttagcattactctaaagagagtgtgctgtagttactgttaatcgcaggcatataactgatagcacaaatatgcggatatcaaaagcggcggatggcacaaaaataatttttgtgtcatccgccgcttttgcattttatattaatcgccttcgatttgtaaccatccctctgtcgcattgaccgtgattgactgtccaatcggtaacgttaaaatcggctgggtatgaccaacattaacgttgtacaaaacggggattgtcttcaaaatcggaaacttattcaaaatagcgattaaatctgtctcactcagcgcgacatcggttggaatacgaccgataatcagggccttcggatgttccatactctgtaataatgccgccaaattgcgtgaaaaatcaaacggatctgacccatctgagcactcaatcaataacacttgatcattataatccggttgataggctgtcccttgtaatgtataaagtgtatttaaattaccgcccactaacgtcccagttacacagccagacgtataactctgccaacgattaggctggtaatcccgcgctgcattcggtaagtaccacgcatcactcgaccactctttggaagccgccaaccgaattggtccagctttctgcgtcatgactttttgccaattatgcgcttgataatcgcccaactgatctaccaatttaaacgaaatataggatggtccataatacgttatcaagcctgtcttagctgtcatcgcatttgccagcgcgctaaaatcggaataaccgcagattattttaggatggcttgcaatcaaatcaaaatcgatatagggaagtagttcattgctgttataaccaccagtcaccgctaaaatcgctttgacattgtcatctatgaaagcagcgtgcaaatcggcaatccgcgcttcaattggactagaattgaattggtccattaccaagacatgctgcccaaacgtcacctgataaccaagtgcactcaatcgatcattcgccggttgattagccacataaccgccaacactttgcaaactattactaggcgcgatgacccgaatctcatcaccttctgataatcgtgtaggaatcatcttaattcacgcctctccgttaccacttcaaaacgctcacataaacaggcaattgtcggcgtaaacacctgccctgcctctgcatattcagctttaaaaaaaggctcgtgaactgaacgccaataagcaagggttcgatcaccctcgccctctaaaaaggcatgttcagcgtcgacttgattatacttaacaatcgtgcacattatcgttttcgtaattgcaaccggccggtctcgtccatctaaaataacattataatcccccacttgtgggacatgctcatcgggttcatacaactcaatcgcagaagtggtggccgttttttgaccgattattaccaatcgtgccaattcattggccatttgttctgtattcccaaatgaataaatctccgctggttgtaaatcaggtggtaactgctgttgttctataaaatgttgccaatactggctcacttctggtgtcattgacatcccctcttccattcgtaacgttgttgttagtttagcagaatttaaccatttaaccaaaaaaagaaacttacccattaggataagtttcttttgatattttatgcccaccgacgcatctttttaagcatcatcggatagcttttaattaggaaccattgtttcatcttaccggttgtttggtcggcacgaatcccagcaatccctttttcaagcatctgttcaaaagtgattgttggttctgtccactgaccatcaacgtaacacagttggcgatactgatttgacttggtgccatcttgttcactaccttggttttgtgcagtcagtggcatgccacaactttgacagaatttttccatgttggactcctttaacgtgcttttcaaaccatgttcctacgtttagcctaattagccaaacaatcggcttcgccgcttactcgtctaattttgctaatcctcagaacataaccagtttgaacacacttattttcttaacgtgctttcatcaacagtttcctgcgctttgctacacttatcaaatcatcgactatgtcgctaattcgttaagttatgcaaatgctcagaagctaaccgttgatgacgcacttcttttatttaatattcttcaagaagttaagcaacattgctgctgatttttggcctgcttctacgatgaattcgtcaaacgttacgccggcttcttcgtcgccgacgtcgctcattgcgcgaatgacaacgaatggaatcttgaattgcgttgcaacttgtccaattgcagcgccttccatttcacaagagagcgcttcggggtaaatttctttgattgccttgattttatcttggctcgcaacaaattgatcaccggtgacaattaaaccaacacgtggttgtatgtcaaccgctttagccgccgcttcgatttgttgaacgatcttagcatcactttcaaatcgttggggttgttgtggtaattgacctggtaagtaaccaaaggcagttgcttctgcatcgtgataagcgacttcgcttgaaatcacgacgtcgccgatatgaaggccttcaccaatcccaccagctgaaccggtattaatcacaacatctggtttttcttcggctaataaaatcgccgtcgtcatcccagcttgcactttaccaattcctgattcaaccaacgtcacttcatgaccgtacaattgacctttataaaaggtattgccagcaaccatgtgttgttgcacatcttctaattttgttaaaagcgtccgaatttcttcttccatggcgcaaatgacactaattttcatactaactctctccattctaaaaaaacattaactttaccattctataggaaaaaaagaatcaagtaaacgataataattaagccaaaggtaatcccaatcgcccaattcaaccgtttcttcattcgtttaaccgctggtggatcgactttcttagtccgacgcgttgctgtttctggttcgtcttcagtcaccgctttaagggcttctttttgttgttcacgtgcatattcacgttctgtcctgaggcgctcttgatcgcgctgtttaaaggcggcttcttcagcctctttttgttgtcgatattcttcgcgcgtcttaggttcattcgtcatttctaccgctcctattttgcttgtaattgccagtaatacaacgccataatcgttttggcatcacagattaaaccatctgcaacggctgcttgtgcttcttctaacgtcaacttttcgacgttcaagaactcatcgtcatctagcgagcgcttatgcgtgaccggcgttagtgtatcagtgtagtataaagtcattaattcatttgaaaatccgggtgatgaaaagaaatccgtcacgtgcacgagcttttgcgtcgtcaaacccgtttcctcattcaattcacgtagtgcgacctgatctaagttcttttcacctggatcaatctttccagcaggaatttctaacgtttcacgttgcatgggggcgcgccattgtcgcactaaaaggatgctgttatccgccgtaatcggaataatgccaaccgccccatgatgatagacaatctcgcgacttgcggtttgtccatttggcagtgccacttgttgaacggcaagatcaatgatctggcctttgaataatgtttcttccgagaggaccttttctgtataatccatctgctaatgccacctttaccgtttaatcgctattatacgcgcatttaaaatcgtccgccatcgtcaatgctaaattcaggttcacggccgaattaaaaatccatccttaggcggatactcttttaccttaattcctgttagaatgaaggcatcaattaaatcaggagctgacaattatgtttaaaaaaataacgatttggtgcacaggcatgctcattacacttgtctcaatcccaattttggcaacatgctttgatatttatggtgattgggataatttcatctggttcagccttggtttattattagggctgatctacgttacaatcagcctcaaacggcttaaacgacaaccagaatataaaaaagatcagcatatttcaccacaaatgctgaaacactaccaagatgctggcatgagtgatgacgaaattgactttttcagacaaacgatgcaacaagccgaagcgcaaattaaggtacttgcaaccaacatgcaagctcttcctaaattacgggcaatcgatttaaatcacgatacaaccaaggtcagccaatcgctttttcgtgcgattgtgaaagatccaaagcggcttcacaatgctggcgactttttataccggcacttaccatcaatcaatgaactgactagcaaatacatcgaaattaaccatcatgaagtcaagacagccgatacctatctcgttttagataaatcggctgcggcaattgatgcgcttagtcaacagattcaacaagactacgcggatttcgtggccgaagacgtcgatgacttagacacagaagtctccgtcgctcaacaacaaatcaccccagatcacaaggaggaagactaatgtctgaaacgcccaatccaacaaacgatttaatgaatgatttattaaaagatcctttcgaccaaagtgcgccagttgtcactgaggaagcagccccccaggcagaggcctcaattatcaataagctctcccctgaacaacaagcacaggccgaacaattggcacaacaactggacgtcaacgaccaacaagccgtcttgaattacggcgctcaagcccaaaagaaactcggcgctttctcccaaacaatgctcaaccaagtccaaagccaagaaacaggcgaaattggtgacgcattaacgtcattgatgtaccgtttaaacgaagccaatcctgacgaattacgcgccgaagacagcaacgttttcaagcggatgtttggcaagattaagaagtcggtctatgaaatcactgcgaaatatcaaaaaattggcgcccaaattgatgggattgccgttaaattggacaaagaaaaaaatgcattaatgcgcgacaatgagacgcttgaaacgttgtatgcgaagaataaagcctacttcgatgcactcaatatttatattgctgctggtcagttgaagattcaagaattagaaacaacgacgattccagaagccatggaacgcgccaaaaatgacgataatcaaatggtcgtgcaagaagttaatgatctcaatcaattcaagaaccgcttggaaaaacgaacttatgatttagaattagcacggcaaatcacgttgcaacaagcaccacagattcgcttgattcaaaataccaaccaagcattagctgaaaagattcaggcttccattaacacggcgattccactctggaaaaaccaagttgccatcgccctcaccctgctccgtcaaaaagatgcggtcactgcacaacgacaagtgtctgaaacgaccaatgacctcttgaagaaaaatagtgcgatgttgaagatgtcttcaatcgaaaccgccaaagaaaatgaacgcggcgtcgttgatatcgaaaccttacagaaaacacaaaatgatcttgttgaaaccttacaagaaaccctcaagattcaacaagaaggccgcgaaaaacgccaagtggctgaaaaagaactcaaccacatggaaaatgatctgcgcgaacacttattggcctatacccaaggtcaaaccgctgctaacagcggaccaaaagaagttaattaaatccacaaaaatagcgccgcccatctttttgatgagcggcgctatttttgaatagttaagctattttgcgatatttcaacatccgccaaccggttagagccgttgcgattaaacaaatcactagcgcaaccataaaggcatcatgcatcccagcgatgaacacattcgcgtgacctggaatataccccgtcactttttgcccgtaattgcgactcattgcggcatataaaaccgtcgttgacaataaaatcccaaagaccatcccaagattccgcgcgagggcgttaatcccaccagcaatccctagatcttcaacaccgacggaactcatgacaatcgtgttattcggtgcttggaaaatcccattcccaagcccaactaagccaacgaagaacatgaataaccagatcggtgtttgtagattcatcaacatataaccgacctgactgatcgaaatcaacactaacccgataaaggttaacatttctggcccaattcgatccgagatactcccggcaatcggtgcgaccaccacttgaacaattgggaaaatcattaaactgtaaccggcaagattaggcgctaagcctagcgcattttccagatagaatggtgaaatcacattgaagaagaagttaacgatgaaaattaagaacgcacagagtaaactcaaactaaaatcgatatttttaaacaatctaaacgataataatggctgttctacatgttgttcaatccaaacagagatgccagcactaattaaggcaacgacaaaggccgctaaaataattggtgaggtaaatccaatttgttggccgatgaaaatgccgaggaataaactaacaattaaaactacaaaactggcaaacccagcatagtcaattttttcatgtgttttaacaatatccttcggtaaaataaaatgcccaaaaataatggttaaaattccaattggcacgttaatccagaaaatatagccccaactaaaatgcgctaagattagcccaccaatcccgggcccggcaatgctacctaacgcaacgaatgatccggttaaccccaacgctcgcccacgctctttcagtgggaaaacctcggtaataatcccattattattgctcatcgtcattgatgcccctaaagcctgaagaacgcgtgcacctaataacaatggtaagccgccattaaagccacacaacaaggaaccaatcacgaataagaaggttccaattttaaacactttgaccttcccaaaagcatcgccaattttaccgaataataataataaggcacaaatcataatcagataaatcgacacaatccattccgcttgattcatcggaatctttaaatcacggctcatgactggaagtgcaatattaacgatactgccatcaagcgtcgacatgaaggtaaatagtccgacagccgtcaatattcgccaacgatttttttgaacctgcggattatccacataacttaatgccatctgtgagtcactttctttcttttaagtttactccgtctattataccgtggttttagttaaggtagattgtaaaattaatccgaacgctgttcggacaaaaaagatcagcttcctttaaaatggtgtttaccacaaacccatcttttaggagctgatcttttgtctagtataacctattccgaacgaattaaaatcgaaaccttttgtgaactagggctgtccaatatccaaatgggcgttcggctgaaccgatcaccgtcaacaatttcttatgaattatctcgatgtcaaccttatcaggctgaattagcacaaacagatgccgaatacaagcgatcacgatgtggtcggaaaactaagctgagcgatgagttaaagcaaaaaattctcaaccatttacgtctaagctggtcaccaggaatgattgctcacgaatttaaactagctactaaatctatttataattggctaaatcaggggagaattggtttctccttgaatgatctacctgaacatggcgtacgccaacggcataacgttgaccaacgatccaaatataatcaatctttggggcgatcaattgaacagcgtcccatgatgattaatcaacgtaagcgcatcggcgattttgaactagatacagtctttggtcctcgtgggcatagtaaggcagttttattaactttaatcgatcgcaaatcacggttcctttgggcataccggttaaaagatcggacgacagcgactgttaatgaagcactaactaagttcctaaccacttttaatggtccggtgcacagctttactgtggaccgtggcactgagtttagtgggctagtatcacttgaatcacaatatggtattaagacctattactgccatgcttatacgccagctgaacgtggtagtaatgaacgctttaatcggaatttacgttatttttatcctaaagggactcgttttgagcacattagtgctcaagatttaacgacgacgttactccaaattaaccagcgaccgcttaaaatactcgactggcaaacaccgtatcaggttatgctgacaaatttgtccaaaaattcggattaaatttgcaatctaccatagtataaccccaatcaatagaatacgctcattgtccataaaagcaaacatatgaaagcgattccgattttttagagtacgaaaaatagccgtcaaacaacgtttgacggctacctttgcagttgtattttggggttatactatatgatctacattcacgaagaacccagtaacattcagtatagatacaaaagccttcatttaatttttggaacgtctctagtcagtaacacgtgctaagaagtaattcttcttcccacggcgaataatcacaaacttgccatcaaagctagtcatcgggtcaatcatcgcatcagtttcttggatacggtcaccattaattgtaatggcaccattttgaacatcttcacgtgcttgacgttttgaagattcaatacctgtatccactaagaagtcaacaatgtttttagcttctttactaatttcaactgatggtgctttgccaaaagcttgttctgcttcaacaacatctaaagctttgatattaccttcaaaaagtaattcagtaatgtgttctgcttcatccaatgcttcttgcccatgcacaaaacgtgtcacttcttgtgctaaccgtttttgcgcttcacgtttttcaggttcagttgcaactttttgtgctaattcttcaatttcatcttcttccaagaatgtgaagaatttcaggtatttaacaacatcgcggtcgtcttgatttacccagaattggtagaattcgtatggtgaggtcttttcagggtcaagccagattgcgccgcctgctgtcttaccaaacttagtaccatcagcttttaacattaatggaatcgttaagccgtaaactggttcgtcactaccttcaagtttgtgaatcatatcaatcccagaagtaatgttgccccattgatcagccccaccaatttgcagttggatgttatgttcatcatgcaagtgtttgaaatcaattgattgtagaatttggtatgtgaattcagtaaatgaaatcccgacttccaaacgactagcaacaatgtctttagctagcattgtattgatattaaagtttttaccgtagtctcttaaaaagtccaataatgaaatttttgacaaccaatcgtaattattaacaaacgtgacgttggcatctttaccaaataatttccgcatttggcttgataaagcttcgacatttttttgaaccttttccattgtttgtaactgccgttctgagttacgaccactaggatcaccaatagagcctgtcccaccaccaattaggatgtatggatgatggccagctaattggaatcgtttcatcatcatgaatggaatcaaatggccgatatgcaaactatcgccagttggatcagcaccacagtataaagaaattttgttattttcaactaattcacgtaagccttcagcatctgtttgttggttaatggcatcccgccatgttaattcatcaataatattttttctcatcaaaatttcctcctaaataaaaaagtcccagcaatctttaataaaataaagactactgggacgaaatatcattttttcgcggtaccacccgtgttatattttgaaagtgcactttcaaaatatcactctagattttaacgtaaatccaacgtacgatttaatgaaacgaaaagtgtaattcgacttagaaacatatatcaggtctcaccaaatcccgactctctgtaatagtggttactaattctactgcgtttttcaatcgctctattaacttatgtgcttatcatagttcacacgataaacaaagtcaacacttttgggctatttttttataaacttggatgattttattctaatttaaatctaatcaaattagaatagtcgtatttaattcctttaaattaaagttttacaacattcgcagcttgtggtccacgtgtaccttcaacgatgtcgaattcgaccgcttggccttcttctaacgacttgaagccttcgtcttggattgcactgaaatgtacaaagatatcgtcttgaccttctgctgagataaagccgaaacctttttcattgttaaaccattttactgttcctttttccatgatgttactccttttaaatacacaattattatctagccaccagaatcggtcatctaaacaagtcaattgtacgcgattttgtaaccgcatgcaagcgtaaaataaattaattgagtttatatcgggtccgccgttgatattgttcgccaggatgcaaaacaatattaccaaactcggtatgatggatggcatctggcatcatttgggcttcaatcgccactgcttggtggggttgaattgcctgatttgttaagtttggttcgtccccgaagccattggcggtataaataacgattgcattcccttctgtatcaattgtgatcgagcggccactttcgggatcgcgtaaaatcgcatccgctttacccggcgtttgattcaacaggaatggatgatcaaaaccaccgaccaatttagtttgcgtattttcactatcaaaagcggcttgcaaagctcgcggttgacgtaaatcaaaggcagagcccgcaactgggactaattccccggttggtaagccgtctggttgaatggcaccaaaacggtcactatcgatttgcaatgtgtgttggccaacaaattgatcaaagtcccccgtcaaattcagatagacatggcatgttgggttaaacaacgtggttttatcagtcgttgcttgatagtcaattagccattcatcggcctcatttagcgtatacgtcgtggtcaccgctaaattaccggggaatccattttcaccatctggactcgttaacgtgaaaacaacactaatcgcatcatctttttcaaccactgatgattgccagatttgcgattcaaaactattggggccaccatgattcgtgttggcgccattattaatcggtgcttgataatcatgaccatcgagtgtaaaagcaccttgaccgatgcggccagctacgcgtcccactgtcgcaccaaaataagcttgttgctttacaaaatccgctagggtgtcatagccaatcacaacattggccatctgaccactttgatccggcatcaccaagtgagtaatcgttgcgccgtattctgtcacggctaattgatacccctgacgattctctagccaatactgccaaaccgtttgaccatttatttctccaaatgcttctcgccaatacttcatgaatgtccctccttataggttaaacatgttgcgtaaatttaatgaatgctgcctgaccttgttcgttgcatttgaaaacaccagcgtcttctagaacgcgcatgaacactttgccgacttcagtccgcactaattccgttacgttatctgatgtaatcgatgtgttagcggctttaatcgtatctgcccattcttgatggtaagcggccatctggtttggttgatcgcagagatagtgttcaacctcagccatttcatctttgagtcgtggtggcaaaattgctaagcccatcacttcgattaaaccaatattttcttttttaatatgttgcacatctgcatgtggatgataaattccatctggatgttctgcagacgtttgattgtcgcgtagtaccaaatcaatttcgaattgaccgtctcgcatccgcgcaatcggcgtaatcgtatgatgtggtgtgccgtcttctgagtgggctaagatttggacacttggatcgctgtaattttgccaactagttaaaatttgtgcagcgagtgtttccaaatgcgttgcattcgcactcgtcaaacgaatgactgacattggccacttcacaattcccgcctgaatatcattatacccgttaaaatgtagtggtgtctcgattggcgccttagccattggaaaatcgtgacgccccccttgataatgttcatgggttaagatcgaaccaccgacaatcggtaaatcagcgttactcccagcgaaatagccggggaactgcttcacaatctgtaataaatttttgaaggttgtttcattaatcaccattggttcgtgttgaccatcgaggaaaatcgaatgctcgttaaagtaagcatatggtgaatattggaacccccacgtctgacccgccaactcgaaacgaatgatgcgatgattacgccgtgctgggaaatctaaacgccccgtatatccttcattttccagacataactgacacttggggtagcccgtttgtttcatcgttttggctaacgcaatttgtttcggatccttttccggcttcgataaattaattgtgatttctaagtcgccatattgcgtcggcacttgataagcgatatttttcgcgattgcggccactttaacatagtcgttggcccgacttaattcataaaagtcggcaagtgcttgttggggctcactctcgtattgatgccaaaaatgacggttcaccgcacttggtaatggcgtcaccaaatccatcaacttcgcccctaaaatgtcttgttctgccgctaaatcctcaatccggctattcgcaactgcaagacgcaacaacgcgtcctttaatccgatgagactttgatcactcaccgcaacgttactgtcctcttccccaacaaggtctaagacgagattaaataagtactgttggtcttctgctgtataaagtgtgtcttgaaaggtaatcactttttcaataaatgtttgaatcaattctcttgcttgcatatgctttcctctaccgatctgcgtatcctgctggatgatttaaatgccaattccaggccgtttcaataatggcttccatattgtcatactgtggtgtccaacctaacacttcgcgtgctttgtcactagctgcaatgagtgtacttggatcaccagcacgacgcggtgccactgtcacaggaattgctttacctgtcactttacgagcggcttcgacaatttccatatttgaaaaaccagttgatgagcctaagttaaaggcgttactatcgtgaccagcttcgaggtaaccgagggccaaaatatgggcgtcggctaagtctaacacgtggacatagtcgcggacgttagtgccatctggggtgtcataatcatcaccaaagatggagagttgttcacgtttaccagcggcaacttgtaagacaattggtaacaagtgggtttctgggtggtgatcttcgccgatcgaaccgtctggtttggcaccagcaacgttgaagtaccgtaatgcgacaaacttgatgccgtaagctttgtcagcccatttcatcatcgtttccatcatcaacttactttcaccataagggttagttgggacttgtggatcggattccttgatgggaattgatttgggttcgccgtaagtggcggccgttgatgagaagacgatgtgtttgacgtcgaattcattcatcacttctaacaaggcagtcatgccgtaagtattgttgtcgaaatatttaagtggtgatttcatcgattctggcacgattgagaaggcggcaaaatgaatgacaccactgacatcttcttgttggaagacgctgcgcatgaaatctttgtcgcgaatatcgccttgataaaaacgggcttgtgaattaacggcggcttggtggcctgtgacgagactgtcgacaacggcaacatccgtgccacgttgaactaattgatcaacggtgtgtgagccgatgtagcccgcgccacctaatactaaaactgtcatcttatcattctcctcttcagttgactgattaacctaactttttagcgccatcggcaatttctgccacatagaaacttggcgcatacccaatcttgtctgtataaactttagcaacgttcgtttcaaagttgtcgacttggtctttagcaacaattgcaatcgcacaacccccaaagcccgcaccagtcatccgagcacctaagacccctggttgttgccaagcggtttgaacgagtgtgtctaattcgatcccagtcacttcataatcaaattgcaatgagacgtgtgacgcattcactaatttaccgaagcgttcgaggtcattattcttgagtgcttcacgggctttcatcgtccgttggttttcagaaaccgcatggcgcgcacgttttaataagttttcatcttgtaacatatatgtttgtaaatcgaatgtttcattgtctaaatcgcccaatgattggatatcattcttcgtttgtaaaatggctaaggccttttcacattcactgcgacgttcattatattttgaatcggccaattcacggcgtttattagtgttcatgataataatcacgttgtcttgcaaatcaattgggactaaatcgtaatccaatgtgttcgtgtctagtaagatggcatggttggctttgcccattccaacggcaaattgatccatgatgcctgagttaacgccgataaatttattttcaaccatgacaccggttttaacaaggtcgacacggtcaatttctaaattgaattggtcttctagaatcacacccattaataattcaattgatgcggatgatgataagccagcgccgtttggaatattgccttttaaataaatgtccaagccactgtcgattgtgtaaccttgttcttgaaggtaaacaatcatcccttttggatagttcgcccagttgtgggctttttgataagataaatcactgaggtcaaatgaaatgacacccgcatcttcaaagttcccagataataaattgattgtttggtcatcacgcttagcaacgactgcatatgtgcccaatgtgatcgcggttggaaaaacatgcccgccgttgtaatcggtatgttcaccaatcaagttaatccgacctggtgcgaagtagctcgcttctggtgctttgtggaatgcgttttcgaatgcggtatttaattctgtcatgttcatagtaaattcctcctttattaatcgctttcattttactaaacatttactaaaaaatcaatcttttttgttaactatcgctttcttttcattggttatgctaaactaagtaatagtaaacattgaattgaggggtgcaccttggcaacgatcaaagatattgctcaactcgctaacgtttcgaatgcaaccgtttcgcgtgtcctaaattatgatcaaacactttcggttggcgatgagacccggcaacggattttcgaagccgccgaaagtttaaactatcgtaaaaacacgcgcaaaatgaaccagcaacgcggacgcattgcgattgtcgaatggtataccgctaaagaagaattggaagatctatactacctctccatccgacttggcgttgaaaagaaactcaaagaactcggttatgacgtaacacgcttctttcaaaacgatccatttgatacgctccatgatgctacgggtgctgtggtaattggtaagtacagccctgcgcaaattaagcgcctcaaaaaactcaaccacaacctcgtcttcgtcgacatgaacacgctcgattatgaagtcagctgtgtgatgaccgacttcaaaacaccaattaaatccgtaatcgaccattttacaaccgctggcttaactaaaattggtatgttaactggtcaagagagcactgctgataatactaaattgggaccggatccccgttttattcattttaagacgttactcaaagctcaaaaaaactatcaccccgattggattttaaccggtgactttacacccgaatcaggttaccaactcatgatgcaattattacaagaccaaagttccgatttaccagaagccctcttcatcgccaatgatgcaatggcagtcggtgctttacgcgccttacatgaatcaggcatcaaagtccctgaacaactcagcctgattagtttcaacgatacctcaatttgccaatacacgttcccaactttaagttccgttaaagtttatactgaacaaatgggccagtcagctgccgagttattggttaaacaactcgccgctagcgaaattatcccccaagtcattacgattggcacgacgctgatactacgcaatagttcaaaataataccttcagcccaccgatgatcaattcatctcgtgggtttttatcttgtctcaaatcaattttcattaataggagtatctcttttgaaaatgaaaaaaattagacgaaccatcttaaccattgctatcttggcagtcggttatcttggtggtcgcaacaatgtcttacaaaatgtgttccctactacagttgctactgagcaaccagctaaacaaacacccccagtcagtcctgattatcaagccattgctgatcaagattttaaaagcggatctgcggcctatctaccaattaataacgatcaaagccaattaacagcaacggattggcaaggtgaaaaaatcgtctatgggcaactcgaccagcttaaccgaacaactagcgtcacagcttacttatcaaagcggaatctgggcaaatcagaaggccggacgcgccaaatttggaatccaacgggttggcataatcaacctctgattgtcaatgaccgccgaatcacaccgcaaaatcgtggccacttgattgcttatacactcacttttaattttgatcagaatggtaactttcaagctggtcaaccgggcagcttagataatccacttaacctcgccacccaaagcgcgtacagtaatcaaaaaacgatgcagatttttgaagaaaaagtccgcactgcgctcgaagcaaacaaaaaagtgatttacaaagtcatgaccgtttttcggggtaatgaactgatgccgcgcggttactgggttcaggccatttccacagatggcacgctgaatttcaacgattacgtctggaatgttgaacctggcgtcgcattcgattacatgactggtcgttctcacttagatgctagcatgcaagtcaaagacggtcagaatattgttgaccgcaccaaacaacaagtcaaacaacttttctaaacaacaaaaagagaggtagcaaccagaataattctagttgctacctcttttgctagcttatttttccattgccttacgcaatgcagcggctaatggactttccgccggttcatcttcttggttcactttttgaatcaagcggcgttcttcatgtttagagattttcttcttacgatctttcttgtcgagcatcttttcggtcgtcccatcattaagacaccggaagtatgcgccgccttgcccttcaataatcaccattttcttgtgacattgtgggcagcggtggttggaaaccttcggatctttccgacgccgatagtgacagtttgtgcagacataaattttaccgtcacgcgtattgcgttcttttaacggatgatcacattccggacattttttattcgtcactgcaaaatcgcggtattccgtctcactctttttaatctcaccgaccaaggtcttagtggcaccctcgatttcagtgatgaacgccttcggattttcttcgcctttggcaatcgcttcaagcgactgttcccattttcctgtcagttctggtgaaaccaaggtctgattaaccaatttcaaaagttgctgaccttttggcgtcactgctaaagcatgaccttgtcgttctaggagttcactacgaactaatttctcgatgatttccgcacgagtggctggcgtccctaatccgtagtgttccatcttcccgagcaacgttccttcagtcaatggcttagggggcgtcgtcaattgttctttaaccgcaaaattagcccgaactaccatcccttctcgccagtcgaccgtcgcggttggttgcccctctttatcggcagcatgccaaccttgttgcacgacttttgtttgcttaaacgtaaaggtttgatcaccaaacttaacggtggctttcgtaacagctgtcacgtatggatcagcaaacaaccctaagaagcgttccacaatcaagcgatacatgcgcagttcatccgtcgataatttttcggcacgaacgggttcttcagttggaattaaagcgtagtgatccgttactttgccatcattaaagacggctttttgtttgacctgactgccttgccccaagtattgcttagcacgtggatcaaatttgactaatgccgacaaccgttccttcaaagtcccttcgatatctgttgagagatatttcgaatccgtccgtggataactgacaactttatggatttcatacaatgattgaatcaaggataacgtctttttcgcagataaaccatactttgcattggccacttgttggagttccgttaaatcatatggtaaaggtgctgattgcgatttctgcgttgttttgacgctaaccacttggcctttggcttgttgcaattgcgcaactaagtcgtctgctgcttggcgcgtcttaatactttgcgggtttgctaattgtaaggcggcttgctgttgatcgaccgtcaagtgaattgtgtagtaggtttgcggtttaaaacgattaatttgttgtgccgtttcgttcacaaaggctaacgttggtgtctgcacccgaccagcggataaattatcttcatacttggtcgtcaatgcccgtgtcacgttcaagccaatcaaccaatccgctttgccgcgtgctaacgctgatgcgtacaaattgtcgaattgcttggctggttttaagtttgcaaaccctgctttaatggccttagtcgtttgcgatgaaatccagagccgttcaaccggcttatcgaatttaatccattccaaaatatagcgcgcaacggcttccccttcacgccccgaatcagttgcaatcaccgcacctgaaatatctttgcggttggcgaggtgactgatggcttttaattgcccacccgttttaggcaatggctttaagccgatatgtttcggaataatcggtaagtcttccaaacgccattgttgccattcttttttgatatcctctggtaattgcagcgataacaaatgcccaaacgcccaagtgatgacgtattgatcgccctcaaaataggttttagttttctgagttgttcctagaactttagcaagctctttggcaacactcggtttttccgtgataactagttttttttgcatttaaaattcctcttacttcaattgatcaaaatagtaactgactaatagtataacgcatgttgagaaggaacaacccagaaatcgcgaaagtatcataaataataatatttcaacagccaaaataaaagattctaagaaactgaattcttaggtagattgcaaatttaatccgaatttttggacaaatttgtcagcataacctgatacggtgtttgccagtcgagtattttaagcggtcgctggttaatttggagtaacgtcgtcgttaaatcttgagcactaatgtgctcaaaacgagtccctttaggataaaaataacgtaaattccgattaaagcgttcattactaccacgttcagctggagtataagcatggcagtaataggtcttaataccatattgtgattcaagtgatactagcccactaaactcagtgccacggtccacagtaaagctgtgcaccggaccattaaaagtggttaggaacttagttagtgcttcattaacagtcgctgtcgtccgatcttttaaccggtatgcccaaagggaccgtgatttgcgatcgattaaagttaataaaactgccttactatgcccacgaggaccaacgactgtatctagttcaaaatcgccgatgcgcttacgttgattaatcatcatgggatgctgttcaattgatcgccccaaagattgattatatttggatcgttggtcaacgttacgccgttggcgtacgccatgttcaggtagatcattcaaggagaaaccaattctcccttgatttagccaattataaatagatttagtagctagtttaaattcgtgagcaatcattcctggtgaccagcttagacgtaaatggttgagaattttttgctttaactcatcgctcagcttagttttccgaccacatcgtgatcgcttgtattcggcatctgtttgtgctaattcagcctgataaggttgacatcgagataattcataagaaattgttgacggtgatcggttcagccgaacgcccatttggatattggacagccctagttcacaaaaggtttcgattttaattcgttcggaataggttatactagacaaaagatcagctcctaaaagatgggtttgtggtaaacaccattttaaaggaagctgatcttttttgtccgaacagcgttcggattaattttacaatctaccatataattacatttcgtctctcaactggcgagaatgcgacataatctttttcgtgagtttgcttcattatttgtaaataattctggtaatttaacaaatagcctcttccatgctccgattctactaaagtcattttataagtctcatttatcgatttaaccgacctgtaaatcgttttttgagatacggcaactacatcggccaattcatttgctgtcatgtaatctccattctttaacaaagcattcaatatctgattcatataaccagtcatattttcctccttatgtttatgatagcgctatttttattaaaaaaagataaacctttgcccgttgctacggtcattcttcttgtttttctttattctagtacatcttgtgtaatgtatacaaaaagccctaccgtattccggtagggcttttcgttgtgtggagttgctattaatattattttttggtacatccttagtgtagcaaaacctgggcagcattccagttacaagttcagcgaattgtccggaaagtgaacaatatcactaaattgtttagtcacttttaacgattttctcaagctgcttcaaattaaaacataaccgctcatcaatcacctccggttcggtctgcagattattttcaaaccaacaatctaattggcgaatgattgcaccgccgtaaaagtcttccaagtgatttaactgttgtggcgtgtattgtgctttgtaatggcgcaatgccttatgaataatctgtttcataacctgttcaaaaaagcggcggcgttccggataatccgctagatgatataaattcaagcaaaacatgcgataccgtgtaataaattgaatggcttcatgacagccggattcccaatcgccactcactatactctcatcaactttttgaataatttgttgttcaagtgtccaccaaaataagccgcacatgcccgttggaaaatgattataaaaggtcgttcgtgacaaattagccgtcttcaaaaaagtcgcgaccgtcaatttcgtcgctttttgatccattaataattcgattaaaatcattgccatatagcgcttagtcgcttgtcgtcgtgtcatttacccacccgttctaattactattgttattttaccaataaacaatcattaacggtaatattattaacaaagattaattttatagcaatgaaaacgttatctaattattatcgattgcacaaaaaaagcggtgcgaatttgatattcgcaccgccttaacacattaattatttttctaaaccttccgcaactgcttctgggtagttggctgtgacagttgcagcacaacgcgcacaaagcattgggaacttatcatctgaaccgatatcagtcttaatcatccgacaacgatcacaaacatccccctcagcatgcgcaacactaaccgaaatgccatcaaattgagtagcttctgttggaacatcggctgattgatccgcaattgttaattgtgagacaatcaataattgtttaacatcagcatccaatgaagctaataaagcagcattggcttcgtttggataaagtgttacggccgcttctaatgacttaccgatgaccttgtccatccgggctgtttcaagagcttttaagacatcgtcacggatccccatgaaggcattccaagtttcaactaagtcttcttcaccggcaaaatgttcaacttctggcatttcagctaattgaacgaattcttctggttcgtgtaagtagctccagatttcttcagctgtgtgtggcaagattggtgtcaataacttcgtcaaggctactgctactgcatagaaaacagtttgtatgttacgacgaggtgcatcattttgaccatcgatataaacaacgtctttggcgaagtctaagtagaaggctgataattcgttcgtcaagaacatgttaattgtcttataaactgtggcaaagtcgtaagcatcatacgccgctttacagctggcgatgattgcgtttaagcgcaccaacatgaacttatcaactgaacctaattctgcgtaatcaactgtatctttagcaggatcgaaatcagttgtgttcgcaatcatgaaccgcattgtgttccggatcttccggtaagcttcactgacttgttggaagttttccattgtgactttcacgtctgagctagcatcaactgaagcgacccagaggcgcacaatatccgcccccatttgtttgatgatcttttcaggcaagattgtgttcccaagtgatttactcatcttacgaccgttaccatctaagacaaagccttgtgaaataacagctttataagggctgacttcgccaactgcaacactggtaattaaacttgagttaaaccagccacgatattgatctgaaccttctaagattaagtccgctggataagttaagtcatcgcgagccgctaacacagcttgatgtgatgaacctgaatcaaaccagacatccatgatatctttttcttttgtaaattcaccatttggactcccaggatgtgtaaagcctgctggtaataagtctttagcatcccattcaaaccaaacgtttgaaccatgctctgcaaagagttgcgccacacgttcgattgtttctggcatgacgatttctgtgccgtcttcagcatagaagattggtaatggcacaccccatgcccgttgacgagagataacccaatcgccacgatcacgaatcatgttgtaaagacgggtctttccccattctggcatgaattcaactttttcgatttgtgctaagatttgatcgcggaacgcatcgattgaagcaaaccattgggctgttgcccggaagataacgggtttctttgtccgccagtcatgtgggtaactatgcgtgaagaagtcgagtttcaataatgaaccgttcttttcaagcgcttctgtcaccattgggttggctttatcgtaataaacgccttcaaaaccaggggcatcttcagtcataatccctttgctgtcaacgactgaaaggactggtaacttatatttagtgccagcgttataatcatcttcaccgtgacctggtgccgtatgcactaaaccagtcccagtttctaatgtcacgtggttgcctaagatcaccaatgattcacggtcatataatgggtggcgggctgtcattaattccatgtcagcacccttgaaagtcttcaagatttcaactgattcccaaccaagaagatcagtcatcttgttcaaacgttctgctgccacaacgtatttttggccgtcagctaacacttgaacgtaatcgaaagctgggttaaccgcaatccctaagttagcaggaattgtccatggggttgttgtccagatgatgaattttgtatccgcatctaataagtctttcccatccaccacgttaaacgccacgtacattgatggtgacttgatgtctttgtattcaatttcagcttccgctaaagttgattctgatgaaggtgaccagtaaacgggcttcttacctttatagatataaccttttttagccatttcaccgaagacccgaatttcttcagcttcaaaatcagctgttaaagtgatgtatgggttatcccaatcagcagaaatcccaagacgcttgaaatcttcgcgttgcttgttgacttgttccatggcatagtcgtaacaaagtttacgataatcaacgaggctcatttctttccgcttgataccctttttagccaaggcttgttcgattggcaaaccatgtgtatcccatccaggaacaaaaggtgcgcggaacccgttcattgatttgtaacgaacgataatatctttacttgttttatttaaggcgtgacccatgtggatgttgccgttcgcaaatggcgggccatcatgaagaacgaatgaaggtttaccttcatttaatttttgccgttgttgatagaggttgttatcggcccaacctttttgccaatcgatttcacgattcggtaaacctgctcgcattgggaaagctgtcttgcccaggtttaatgtttctttgatacgcatcaaatcactcctttatttttaaaaacaaaaaaagatcccgccctgaataggacgaaatcttcgtggtaccacctaaatttgaaggtcaatgaccttcctcaacatgcaataacgcgcattaagcgtcccaaattactcaattcatctggaatgaaataaggtgatacaccgctaaacagagcattaccaaccttccaccgtcgttggctcgcttaaatgatgttttgcttgctagtccttatttaaatctgttgcttggttttcaattgggttgtaagaatccgtaacagcttcaaccacttcatctgaatcggtgtcttcgactacatcggagagtacttcatcattgtcatcttcttcgactggtgtttcttcaccagggaaaataatggtttgcgttgttgtcacatcatcttcagcaatttgaccccaaggtttaacttctgcatccgagtttacttgatttgacccatggttgtcaaggtctgtcatatcaatttcagctgaaagagcttgatggtccgctaaatcatctttagctaataaatctgtccattcaggactcttaaccacttctaattgtgattcaagcataacttgtaatctttgacggaaaatccgtgtttgtttcttcaagtcatcggtttcgattgcaatttgttttgcacgttcagttgcatcgtcaatgatgtggtttgatttttcagttgcatcatccaacattgattttgcattcttttctgattcagtttgaatcatttcagcttcttttttagcgttatctttaacacggtcagccgcttcttgtgcaacaatgattgattggttcaacgcatctttcaattcattaaaatacgttactttttcatcgcttgattttaattccgcttttaaactttcattttctgttaaaactgattcgtagtctttaatcacttgatctaagaaatcattgacttgatccggattgtaaccccgcatttttgtgttaaattctttgttatgaatatctaaaggtgttaaaaccattttgaaattcctccatctttttcagcaattattttcttaaaatccccagtgtcactcgatatttttctttacgagtctgaccatcaatcgattggagttgaatccggccaaaaccacgaacagagacgatatctaatagtgctaattcaaaatctggtttatcaaatgcttgccaattcagtttaactttgttggcttgaattaattctttagcgcgttgtcgcgacagattgtaaacagttgaaatgatcgtatccaagcgaaacgagctgacagtcgtttgttcgaattgccaagcgtccttaggcgtcaacaactgtgtatagtcttgttcttgcaaatgaactgatacgcgaccaatcttagtgatttgctcttcgacatagcctgccatcttcttcgtcacaaagaattgccagcgttcttcatcggtcataatatccccaaaaacatcacggtcaatgccagcattcacaagcgtgccaagcaccttcccatgtgataggtttgcaaatttaatcgggtaccgaatctcaaataattgaatctcaaaatccgcatccgttggttcaaagtaatctggagcaatcattgcccgtttccgttcagcagcgttatatccgccattaaagtgataacggacgtcccctttttcaccgaccaaggtttgtaaaataaacgcttgacgcggatctaaaaacgccgttaagattggtcgatattcaacttgtgcttgctcaatccaatccaaaacctgcgcaacaaatggcgcctcgctttttctaaaatgttgatagacatctgcttgattgaccattgattacatccccactaataattgtgcgagtaagccgatcccacgttctactaaatataaaacgaaaaacgcagcaatggctgaaatcccaataccaccgattgcaggaatgaagcggtcaaagatttctaagaaaggttcaactaacttagcaacaaagcgccctaatttactgcccatcgcctctggaatccacgttaataaacaatagattacgacgatgccactataaatccgtaccacatacatgagcatcaagagcacataaaataaaaatagttgcacctagttcacctcaatatcaaaatcattttgatcgacaatatctgaaagattaccatcgatttcatagttcggtggcgtacataagaaaatctgatcaccaacccgttgaatttcaccgttgatggcaaaaactgcccctgttaggaaatcaacaattcgagtggcttgtgtcgcttcaattcgtgtgaagttaacaatcactgctttattttcaagtaaacttttgccgactttttttgcgtcggaataaatccgtggttcacataagacaattttattcattttagtagctcccgcagcttgcatcgagacgacgttattcgggcgaacacttggttcaccttcattagtgacagccgcagtttcttgcgtattagcatattcatcttcatctgacatgccgaaaaaattgctaagactaaacttaccagccatgagtcatcctccttagttattgcgacggcgcttgaaaaatggcggcacatcgtccccattttggttatcttgcttattatcatccgcttgggctgtccgtttgaagatatcgaaatctttcttttcaatttcatcaaatttttcagttgcttgcgcttgctcgcgggcacttggttcgcgacgcatatcccaatctacaaatggatcattattttgttctgatggtgttgaaggcgctgttgtctttggtgctgaattgtttgttgctggacgacgtttgttgttatcttcatcaatcccagttgcaataaccgttacaacaacttcatcaccaagattttcgttgattgaagtcccgaaaatcaagttaacatcgttagttgcagcttgttgcacgataccagcagcatcttgcgcttcaaacaatgacaagtctggtccacccgtgatgtttaagaggacttgttctgcaccatcgattgaaacttccaataatggtgatgaaatagccttcttcgttgcttcagctgtccggttttcacccgttgctgaaccaattcccatcaaggcagagccttggttagccataactgttttaacatcagcaaaatccaagttgacaaaccctggtgatgtaattaagtcagaaatcccttgaaccccttgacgtaaaacattatcggcttctttgaaggcttccatcattggtgtcttcttgtcaacaatttcgagtaaccggttattagcaatgatgaccattgtatcaacatgttgctttaattcagcaatccctgaagcggcgtttttaccacgtttagggccttcaaatgtaaatggacgagtaacaacccccaccgttagtgcgccaagatctttagcaattttggcaacaacaggggcagcgccagttccggtaccgccacccatgccggctgtgacaaagatcatgtcagcgccttttaaggcttcgttgaggacttcttcactctcttcagcagctttttggcctatttcagcagttgcgccggcaccgaggccgcgagtcaacttaggtcctaattggatctttgtttcagcttttgaatcttcaagtgcttgaacgtcagtgttagccgcaataaaatgaacacctttaacgccttcgttgatcattctgttgacagcgttaccaccagcaccaccgacgccgattactttgatgattgcgccgctattttcttgtgctgcatctaatgaatattccatctgtttttcctcctgttacgactagcccttattcaaaaaagttactaaagaaatttttcaggccttcgaatgcattttttgattgatttttaggtttggttttcttacttggtacttctttggttgttgcttgaaatttcattgttgatttcgtcactgtttggtctaattcagtctgtgctacattcccaagtgcgccttggaccaaccaatcaacttccgacaagttagctatgtagttaattaaactcaacccttgggcaaatgatgggtgccgcaagcccatttgatctggaatgtataacttcactgggcaattaaagatttccttagccaagtcgacaatcccaggtaaagctgtcacgccaccggtcataatcaccccaccaggcatatcaaaagcgtgtactttatccaattcagctttcaaacgatcaaaaatctgcatcgtccgtgcttcaataatctcagctaattttttctctgtcacttgcactggtaaggcttgaccaacaacttcaattggaatttgttcttcttctgaagcagccaatgaatcagcattaccataatctcgtttagctttttcagcattttcaattgacgtgttcaagaccacggaaatatccttggtcatatggtcgccaccttcttgatcaatcgccgtaaattttaattgatgatcatgaatcacagcagctgtactttgaccaccgccaaggtcgacaacgattgccccaaaatcttgttccccgtctgataaggctagcttaccaagtgctaatgggttcactacgagttgtgatagtgttaaacccgctttttcaatacatttctttaaattatgaatcattgtcttgggtgcggtgaacaaaattccgttcatctcaagccgaacccccaccattccgcgtggatctttaatcccatcaaatccatcaaccgtaaacgattgcggtaagatattgaggatttcacgttcaggtggtaaattccgaaccaatgcggcactagcaacgtcttgcacatcttgaccagtaatttccttagattgatcagagaccgcaatcatcccttggcattcttcgatttgtagttggttggctggaattccagcaacaacccgattaatttcaatatttgctttttgttctgcttgttgtacggcttgttggatagcggtaaccgcttgatcaatgtccacaatcgtcccgcgacttaatccgtttgatctagctgatccgacgccaatcacattaagttgtttattaattgattctgcaacaattaccttaattgaagtagttccgacatcaagaccgacatatatttttgaattctccattaagtgtgtggaacctccttgcattcaattagaataaaatgattcctatgctaaatagtaccacatttcgactagatttagaaagccaatccaatctttttaaacagtgttaactaattttttgttgaatcagcctcagaattatcaaataatttggcgtaagcgccaacttctaagtcaattcgtcccttaccgtccatttgtttcgccagtgtgggataatatttaattttcttggcaagtgtccgcaaatccccaacaacctcattaccatcattcatatataagtgaacttgataaggattattgttcttagctgttaaacgaatttccgacacagcactttgaatgctgtttggaaaagcttgatatagttttaacccttgctttaagaaggcgtcatttttaaattgactatagacagggctattgccgagagactgcgtcattttcgtctttaaaatcgtgccattttctaagattggataatattgtttatgccgcactagatagcccaccgtaggatattccttaatcgccaatgtcagttgattaaactgatcaactttgacatttacgcttttcaccttaggtagtttctggtgaatccgcttctcaatcgctttttcctgccagatttgtgtcaggacgttatcgccaatccgcacgccactcgcattaatcacctgttgatcaggcactgatttagtcccgttgaccgtcatttgttgaacgtcgctaatcggcaacataaaatagattgccacacaagcgcccaatgtgaaagtgctcaataacgctgtcaaccgccactttgtctttgccgttcgttgcgcttttagatgtggtagttgaccactaattgttggtcgcccaggcgttaaccgttgccgacgttgtttcttccaacgctttagttgataagcgcgccaaacgtttagtaattggagcggatcgagcgacccatttttagttgtttttttcttcaagtcatccgcccccttcttaacttagatgatagtattaatcacttcaataatgcgatctgaagcgtctggaatccccattttcttagctgctttagccatggcttgttgactatcaggggttgccaaaagcgtatctaatgactgaactaatttgtcacccgttaattgtgcttctggaattaaaatcgctgcgtcttctttaaccaaactctcggcattttttgtttgatgatcatttgttacataggggcttggaatcaaaattgacggaatcccaagtgctgtgatttccgccaaactcgtcgcaccagcacgaccaacaatggcctttaaatctggtaaaatttcaggcatgtcgttgatatatggtacaacagccaaattatcgttgagcgtcatcgtctttaattgtgcttgaacatcatcaaaatgaacccgtccagaaacgaatagcacctgatactctcttgtattaagtgctggtactgcatcgataaaagcttggttaatacttggtgcaccacggctcccaccaaacacaagcactgtcggactgtcagtcttaagcccgaattcacttaaacgttcgtttggtaacattccagcaacttgttgggcccgcggattacctgttaatacaattttgtgcattgggaattggtcgctgactgattcaaaggaaatggcaactttatcgacaaagcgcgccaaaaagcggttggtaaccccggctgctgagttttgttcatgaatcaacgttggcacttttaagcgacttgctgcatacagcaatgccccagaaacatagccacccgctccaatcacaatatcaggtttgaatgttttaatcatttcttttgcctctttaacactgcgcaagaaaagttgaattgttttaatattcgttttaatgcccttcatattcatcgaacgtttaaatccttggatttctaacgtcttaaaatcgatgccttgatctggcacaattttactttccaaaccgcgtttagtcccaacatataaaacggcatccaacaagtcgcgttgttgcattctttcaattagggctaacgctggatagatgtggccaccagttccgccaccagatatcattactctcattttagaatctccaatttaatctgtaatttgttcgactgccttaataaagacgtctccacgttcttcaaacgtcttgaactgatcccagctcgcacatgcaggcgacaataaaaccacgtcgccggcttcactagcagcataagcttcaggcactgcttttgttaaattatcaactattttgatgacgggaatacctgcttcacgtgctgtctgtgccaacaattgtttggtttcaccatataagatgattgcttttacgtgttcttttagtagtggtaataatggttcgaaagtaaagccccggtcaagaccacccgctaataaaacaattggttgtttaaaactcttcaacgcgacttcggtagcttccatattggttgctttagagtcgttatagaagcggcgaccttcatagctcgtcacaaactgcatccggtgtttaacgccggtaaaggtcgttaaaacatcaatgatcgcatcgtttgattggtccatcaacttagccgccgcaattgcggccaaagcattttcaatattatggtcaccagggacgttaatatcagtcactggcattatcacttcacccttaaaacaaagttggccatctttgacataggcgccagcttcagagttgcctagccgtgaaaatggcacaacttgcgccttagtttggcgactcaattcacgtagttcaggtaagtcccagttgacaacaaaaaagtcgtcagccgtttggttttgaataagtcgcattttcgcagccacgtaattcgcacgcgagccatgatagtccaaatgtgcttcataaatattcgttaaaactgcaatcttaggtttaacggttgttgtaccgagtagttggaaacttgataattctgtgaccatcacatcggcagccgtcactttttgggcgaccgcacttagtggaatgccgatattgcccgcagcgtatgcgtgcccctgggtgcgattttcatctaacatcaacgtaattaacgttgtggtagtcgtcttcccgtttgaaccagtcacactgacccattgggcttcagacacttcgtacgcaagttctggttccgttaaaactggaatcttacgcgcaatcgcttctgccaccattggattatcgtaacgaatgcccggatttttgaagaggtatgcaaagttgcgctcaaataacgccaatggatgcgatccagtaatgacggttgcccctaattcacgcaattgtgcaacttgaggattgtcttcttgttcctttccgtcattgacggtcacaatcgcccctaattttaataacaatttagcagcattaaagccgctcttccctaatcccaaaactaaaactgcctgatcttgatacatcgtgctggccttcattaaattcgccctcttctaaaaaattaacagataaattgctgaacagatgatactaaataaccaaaagctgatatcaatccgccattcactccaccctgacatttcaaagtgatgatgaatgggactcattttaaaaatccgcttatggaataacttaaatgaaccgacttgtaacatcacacttgctgtttcaatgacgtatactaacccgaccaatagcagtgagaactctcgatgtaataaaattgacatggctgctagtgcgccaccaagtgctagtgaaccaacatcacccatgaaaatttgcgctggttttttattgtagattaaaaagccaagcaatccgccaataatgctgaggccgaaaatggcgacatcaatttggttttgacgaaaggcgataattgtataagttgcaaatgagatggttgccaagccagcaactaacccatcaatgccatccgttaagttcaccgcgtttgagaaaccgactaaccacactaagacgaatacacaaaagaaccagttacttgaaatagtgccaattactgggatttcaagtgcagtactgaagccttcatggaaataaacagcgatgaagacaatcccaccaataatttgccctaacaatttttgccaagcgcgtaagcctaagttctgtttacggaaaactttaataaaatcatctgaaaaaccgagaataccgtataacaccagaataaacatggcaattaatagactattcgttaactgttttaagaataatcctacccaaatacttgaaacaacagcggcaataatgaataagagcccgcccattgttggtgtcccatttttcttagcgtgccatttggggccttcttcacggattgtctgcccctcttttttaaagcgtaaatacccgataaaaagcggcataaaaatcaccgtaattacaaacccactcattaagggcactaaaaattgtcctgctgccatttcataaactcctttaatccaactatcttattttaattgtacttttatttttttaaccccatctagcaacccattgaccgctaggctttgatgataagcatatccgctacctttgatgtcaatctcaacacctgttaattgcgcgagctttaagaggtcatttttcgaccaacccgtgacatctggcatcgtcattgccccattggtcattaaaatgactcgctgtttaggtaaaatcacactattggcctttggtaattgctggacgactaagttcccactaccaacagaagcggtttgtaggcctaaatccgttaatttcttttgtgcttcatccgttgattgaccaatcacagacggaactgttacttgttgttgtgtgtctttttcagcctttttggtatactccagtgcccgtttcatcattggattgaagacctgtgccaaaatactttcagcactatctgtcatattctgcggctgtttcattgtgacatataaaatatacttaggatcatcagctggtgcaatccctgatacagagaagatataattgcttgcgccggttaaatagccaccgtctagaccagtaatttgtgcggtcccggttttaacggctactttataatctggaatttggtaaacctgacccgtcccataatcttgataaacaacatcttccatattttgtaagacagatttggccgtgctagccttaattggtttaccagctttgattggttttacttgatgatcctgattaatcccagataaaatctgcggtctaatcattgtgccatcgttcgcaatcgcacttgtcatctgaagcatctgcattacattaacgttaatcccttgaccaaatgaagttgtggcctgatctagtggccgaacatattgcaatgtcccctctgtttcgccgggtaattgaataccagttggttttaagaaaccaaacttctgaatgtagtctttccaaaccttaggacccatggcttgttcaagcttgaccatcccaacgttacttgatcgtgcaaaggcttgactcagcggaatcatcccccagccactcgtttgccaatcgctaattttcttatcgccaactccaatcgaaccggattgataatactgattaggattgtaattaccagagtcgatggcagctgccaaggttgcaattttcaaaacagagcctggttcatagccatcttcaactaatgtatctcgccaaatcttgccaattccctttttagtgctggcattaaaggttggtcgttgtgaagccgccaaaatttcacccgttttagcattcatcaagacggcattcatactcttaggcttatattttttattgacgctcgttaataaagtttccatgtatgattgtaaccgagaatctaaggtcaagtaaatatcttggccgtttttagcggcttttactttgtttttcttttgattgatcgtgtatccataggaatcacgggcaaaattcttgtaaccatcttggcctgctaattgtttgttgaagtatttttcaatccccattacaccaacgaggctttgatcagcgccgtcttcgtcctttggtgattgagcgataccaatgacgtgagatgcgaatgttccattagggtacagccgcgtaggggactcattgaagtaaataccggttaaatgttctttttcaatcttccgtttgatgctcagtgaaaggttttggccggcacttccgaattcaacttgataaactgaacggttagctggcgttaattgtttatagattttttcttcactcaatggtagatagcgactcaaaactttcgctgtttttttcttatcagttacatataacggcttcttattaggaccaacgtaatcgtgacttaataccgcatacactgaataggcgttaatatcttgtgccaaaacgttccctaaagaatcataaattgtaccgcgttgtgcgcgaatcacggaatcagctttgtattttttctgtgatcgtttcgttaaatccacccctgcaatatgcccagtagcagcaatgtaagcaaaacgaccggcgaaaactagaaaaatcgccgcgataattagcaataaaagcctgccaaaaacgcgtcgattccgccgtggactcttacgtgtcttaactgatttcatttagacacgttccgaatattattttcatttagtttaagatcatgtttctgggcaaaagcattcagacggtcagagcttgttaattcaccgatctcctgttttaaatcattattgttagcgctgacttgggccatcttttgagtcgtactttctaatcctcgttgtgcattaacaactgcaattttggtggttaacaaactaaccaacatcgcgaaaaagataattccaataactgacgtcgctaatttttcaacagctgaaaaaaccacttttttagactggcttgcaactgcttgtttatgtgcagtaggctgcgtttttagcggtgctactggcgtttctaattggcgtgccgtgttagttgccatcatcatcaatccttctagtcaatttctttttgtttttctgcgacacgtagcttagcgctatgtgcacgatggttttcttctaattcatcatctgttggtagaatcggcttgcggttcactaattttagaaccgttttttgttcttctggtaaaattggtaaccctttcggtaaatctgggagcgttgcttgttccttaaacatcgtcttcaccaaacgatcttctaatgattggaacgtaatgacactgatccgcccgccgacattgaccaatggaatagcttgttcgagtgaatcttcaattgcccctaattcatcattgaccgcaatccgaatcgcttggaaaatccgcttcgctggatgtccaccctttcgtcttgctggtgcaggaattgcttctttaatcaaatcagctaattcgattgtcgtttcaatcggcgcaactgctctttgttgttcaatcttccgcgcaacttgttttgagaacttttcttcgccgtagcggaaaaagatcttaattagttgttgataggtccactcattaacgacattgtaggcactgagttccgccccttggtccattcgcatatcaagtggggcttctttcttataactaaacccgcgttgggcatcatcaaattgtggtgatgatacgcctaaatcgtataaaataccatcaatcttagtcacaccgtgttctgctaacgctgcttttaaatagcggaagttactcttaacaaaagtcacttggcccgcttcagcatatttggctaatcgttgtttactacttgctaaggcatgatcgtcttggtcaaacgaataaagatgaccggtcgtcagctgagataacaaatattcactatggccgccgccccctaatgttgcgtctacatacacgccatcgggttgcacattcaaggcatcaaccgtttctttcaataaaacactttgatgtttaaatgtttctgtcatctatttaccatccttctaaaaatcaaaatctaacatattttctgcaatatcatcaaaattctcttcagcttcttcgctaaagctcgcccatttttcctggctccaaatttcaatgcggtttgagaccccgattaacacacattctttttcaagaccagcatgtttagcaagtgtgtctgggatattcacccgaccttgcttatcaggggaacattcgaccgccgctgagtagaaaaagcggacgaacgcgcgggcatcttttttagcgaggggcagtttttttaacttctcttccaactgttcccattcactaagggggtaaccaaaaatacaattgtccatgccacgggtgagtacaaattccgcacctaatgattcacgaaatttagccggcatgattaaccgacctttcgtatcaatcgtgtgatgaaattcgcccatgaacataaccattcacccctttgcccaccttaactgattttagtctaccacaatcccccactttctaccacattttgccaaaaaaaaccaaaatcttatcattttggaaccaattgtacacgatatttatattactagcctttttgaccaaaaaaaacagccatttcgttaaccgaaatggccgtttcacttgttaattaagtaagcttattttgggctgtcgcaccacttctaagcaacgccgcaaaaaattgctcactttaatctaatttttagaagtttaaaatgccagttgcagcgagtgaaccaaaaatgactgagcccactgtggcgattaacattacccaaacgaaaattttagtaatgcgactaaacgtgcttgtttgtttcttcaattattccaccacctagacttttttcttatcagcagtttacaccgaatcacttgaaagtgcaactcagtcctttttatcttttccaaaagacggtacaatgggactattaactttcgaggtgatttaaatgccatttagcacaacacttttctttgcaggcttaccgcccgtctgtgtcgcactcggctactgtatcgaccggttgactcagcgtctatttaaacatcgttttcattatattaattggctaccaattccattgctagtaagtgctatctttctgagtatgccaattttcagtaaagctggctggttcttttgcttagctatctgtctgtggggaatcatctggagcttaacgcgcttttactacgaccgtgcgctgtacctacgtaagtttctacggagttggtggcgctttgtcctcgtgatggccacagcatggtacctatcctttctaatcatcacactcctttaaaccaaaaaaacggtgtcgactctttcaatttgtcgacaccgctttttttagtttaaaaaatatttccctaacgcgcttaattgcgtaattgtgattgtcggttgcaccgtgattggtaatcgatcaacatcgaaataggccgtcgccacatgggcgttaatccctgcttcaatatctaatgcacgatcaccaatcatcacggttttagttttatccagctgataacgatcacataaatcgttcaaactatctggcgccggtttcctggcaaatccgctctgactcgtaacaatttcagtaaaataatccgctagtccatgcgctgccaaaaatttttctgcagcatcatcacgatgggtcaataagaaattctgaccatgcgcactaatctgtttcaaaatcgccgctgcccccggataaggttgcggcgtctgttgtaattggtgttctaattcatgatattctcgatccaattgttcaaatgaaacattagtttgctgagcaagcatctgcagttcccgtttaattgaagtctgcttaatcgcttggtataagcgcgattgatcgactgcgacttgatgatcacggtaaacctgactgagcgccgtcatcataacaggataagtatcatacaatgtaccatcgaaatcccaaatcgcattttgataactcattaattatccattctcctttgtatcaaataggatagtgactggaccgtcattgaccaaagccacttgcatatcggctccaaattctccagttgcgacgcgaatcccagtcgctgctaatttttgattaaactgttcgtataagcgtttagcatagtccggtttcccagccgcagtaaagcttgggcgattgcccttcttagtgctagcaaaaagggtgaattgtgataccgataaaatggcaccgtcaacctgggccaacgccaaattcatcttgccatctgggtcttcaaaaacgcgcaattgactaattttcttaaccaagtaatctaaatcagcttcagtatcatcatcacaaataccgaccaataacaaaaagccttggttaatcttgccaacaatcgtctgatcaatcgtgacacttgcttggctcactcgctgtaatactactcgcatattaagtcgctcctatccttgaacccgtttgacttcgtaaacatctgggatgttcttcacggcttccataatcgtttctaaatgatctgtattgcgaatgccgactgtcacatgaatatccgccatcttatcgtgatcaatccgccccatcacgttatttagctgtttcgtatgtgcatttaaggactgtaagacatcgttcaatagtccaccacggttatagccgtagatttccaaattcgcatcatagagttgatcattcttagcgttggtattttcccaactgacttcagtcaatcgactgttcatatctgcccgatcaacgatattcggacaatcgcgccgatgaacagaaaccccacgtccctttgttacatagccaacgatatcatcaccagggactggattacagcatttactcaagtgcactaagacattgtcgacaccttcaataacaacaccgtcttcatgtttgattgtgatatggctaccatttgctttaggccctggttgttgtgaatccttcgctgatagaatctcagcttctaatgctttttgttcactttcttcttttgcccgtcgttctttaatcgttaagcgattgacgactgattgtggtgagatttcaccgaacccaattgctgcaaacagttcttcttcggcattaaaattaaaatgcggtaggatgacagctatctcggctttagtgaggtgttcttttggtgtataaccatcttctaccaacagatgttcaacagccgtccgtcctttttcgacgttttcatcccgatcttcttttttaaagtagcgcttaaccttattccgagcacgcgcggtgaaagcgagcttaatccaatcacgacttggtgtcgcacttgttgacgtcaacatctcgacaatatcaccattacgtaattgatagttcaacggtacaattttgccgttaatcttagctccaacagcgtggttcccgacttcagtatgcactaaataagcaaaatccagtggcactgaaccctttggtagttcataaacatcgcctttgggtgtgaaaacataaacgcgatcgctaaagatatcgcctttgacgctttccataaattctgcagcatcatcggaagcatcttgaatttcaagaatttcacggaataaatcgagtttacgccctgattcatccagcttaatctgttccttaacgccttctttatacgcccaatgtgcagcgaccccatattcagcaacatcgtgcatttcttgcgtccgaatttgcacttcaagcggtttgcctttgggaccaatcacagttgtatggatcgattgatacatgttggcctttggcattgcaatgtagtctttaaaccgaccgggcatcggtttccacttagtatggattgctcctaaaacagcatagcagtccttgattgagtcaacaacaacccgaattgcgagtaaatcatacaattcttcaaattgtttatgctggtcgcgcatcttgcgataaatcgagtaaagatgctttggtcgtccataaatgtcgtaattcatatctaaatcagcaattgagtctttaatgtcttcaattgcttcttgaatataagattcgcgttgtgtccgcttagaattcatcaggtgcacaatccgatagtactgttgtgggttcaaataacggagcgagatatcttccaattcccacttaatcttactaatccctaaccggtcagccaatggtgcatagatttctaatgtttcgttagcaattcggcgttgtttttcgggtttcaaatgtttcaacgtccgcatattatgcaagcgatcggcgagtttgaccataatcacccgcaagtctttagccattgctaataacatcttccggtgattttcagccagttgttcttggtgtgatttatatttaatttttcctaatttcgtgacaccatcaacgattaccgcaacatctttgccaaacatctcttcaacatcacctaacgtgatattcgtatcttcgacaacatcgtgtaagtaaccagaagcaaccgtagcgggatccatcttcaattcagcaagaatccctgcaacttgaattggatgaataatatacggttcacctgattggcgaacttgttctttatgcacataagctgcaaaatcatacgctttttggacaaaagcaagatgctcagtattcatgtatttctgacataactgtagcacttcctgctgtgaaattactttttcttctggcatcctgcctcactccaattcctcttactcgattaaaaatgtactgaatacaacaaaactgactcaactaattaactgtcgagtcagtttgcttaacggcgttcatacgcagtactaattcctaagtaacttaataaacaataaataggaacgaaccaatagttataatctgcgtagcgcacaaccaccatcaatccaaataaaatcggcaggtacaaaatgtgataccaagctgcatgggtcttttgaacacgatacccaatcataaaggctgcgcaaccattgacagccatgaatagcagtccaatccgccacgttttatcgatgtgcaagacaccaaacactagcggtaaaacgaccgccaagagaatggccactaataaatagcgtacccaatccatttttaaataacgattattcataaatttagtcatgttgtgcccctctgtaaaaagattatatctatcatactataaagtagccaattctgtcacatacgaaatcgcacttaacagatataacggcgcggtctcggcccgtaaaatccgtggtcctaaaccagccatcttaaagccagccgccgcaagcatctcaatttccttgggcgcaacgccgccttctggaccaaaaacacaaagtaatcgatccccaggttgggctgtttgtaagctctgaactaattgggcatgctcaccgtctttagctgactcttcgtaagccactaatttaatcgtcgctgattcttgtgcgaccgccgttaaactgttgcgccattcaatagttggtacatgcgtccggtgagcttgttcggctgcttcttgcgcaattttttgaagccgcgcaactttcttagcttgttttttatcatcccagcgtgcgactgagaattggctattacagaaaataaaccggtgtgcacccaactgcgtgcctttttgaacaatccagtctgttttgtcaccctttgacaagccgcatacaatcgtcgtctcaatcggtaattcaactgattttgtaattggcgattgcaccgtaacggtgactgttttgtcagttgcatccagttcagttaattcaccgatgaatgcttgttcatccggcgttaccaattcaacacgatgaccaggctgcatccgcatcacttttagcatatgatgtgcagtttcacccgttaaggtcacttgttgttctacttgaattgcttcatcaataaaataacgttgcatgccatactcctcttaatcgtcgtccgtcttttggcgtgtaattaatgccacccagtcacccatatgaagggcttcttgaacaacaaaatcattcaccgctaacgtttcacggacaagtgcttctttatctgcaataatgccggccagtaataggtgtccattgtcattcaataaagccttggcttggggaatcaagggcacgataatctctgctaaaatattggccacaatcacatccgctttcgttgtaatcccgttcaacaaatcgttgggatgggcatcaatgccagcggtcactgggttgagggcaaaattttccttagcggcatcaaccgcaacttgatccacatcataggcgcgaatatcattgactcctaaatgcgcagccgcaatactcaaaaccccagaaccagtcccgacgtcaattaaagattcaccgccgcgtaaaaccatttctaacatttgtacggatagatgggttgttggatgcgttcctgttccaaaagccatccccggatccatccgaatcagtgcttcgcgttcatcagtcggttgatagtcggtccaacttggcacaaccgttaaaaagcgagttagccgcgttggttgataatatttcttccaagctgtcgcccaatcatcatcggcgacttgtgccaatgtcaccttaccagaaccaatcgctaacccaaagtcagtcaattgggcaacgcgttgttcaatcaacggtaatttttccggcacaaaaactgtttctgggaaaaaggcactcactgcagcacccgtttcaaggtggggaatactgtctagatcaataatttgatctggctttgcctttaaatgttcataatcggctgcgtcttcgatttggattccttccgcaccattttccgttaaaatattggcgattgcttccactgcttcgttaacagtagcgaccgttacttttgtccattccatgtagcatgtctccttcttaatgcgggttgcttagtatttagggtaagcgtagtattttttcgctaattgatcatctgcttgagcgacagttgcttggaaaacagtgtcatcccagtttaagataaaggtttcttcgtctgattcatcattcacaaaagcggctaattgatcttcgccttcatctaataagtcttgtaaatagttgaaaaagccccgaccgacttgtgcgtttaaccccttgcgaccagcaaatggaatcactgctaaataattgtctgcatattcaaagccgtccatcttactttcatcgaagaataaaatcgcatcttcataactgatttcatccgattcgttcaattcaccattttgatcttcaacggcaattgcttgttccttagtcacgtttaatgtgaattccaattcaatcgcccgagcttgtttgtcccagttgatattcatatccccactaaattgtaaatcatctaattctgcatcgaaaaatgctaacatatccatttcagccactgtattcaccatatccttttaattagtcgttatttaagtcaattttaaagttgaacgtattaacatcatacctgattatgacttgaatctaaagcaatcattcaaaaaagcccagaacaaaatgtcccagactttcaatcgtaattctacttaatgtgctgcttggttctgaccccaataaataacgtccatactctgatcgtcataacgttggaactcaattccgagtgctgcatcagattctgccatcacacgaccatatagccgcatatcagcttctggcgtgttgccatctgggcgaatggcatgcatcaacataaacttagccatttctgattgtagatgggcttcaatcggggccaacggatcaaaaaccatcgtgacaaaccgaatatcactactatcgccatcaccaattaattcaacaatcggaaacccaccaaaattttgttgttgttttaaataagccaataactggtcaatctgttcttttgtgaaggctgatttataaaagaggaaatgccaagtttgtcgtttcatcgtgtcacccacccgttatttattacatatagtatgccatactgtcaccaacaacgcgaacttagtctttttttggtaattgattcgattttggttggtgatatgcctttttcaagccagcaaatgtcgcttgaatcttttggtaatgcatttcatcgttacgcgcatgcttcaccaactgggtaaaatcgtgggactgtaagtccttttctgtttgttttttaaaccacaacatatcatcactccttatgtaattttattatacaacgaaacgttatcattgcagtcttaaatttacttttaaaccaaattgccgtaaactaacactattcattaaagtctagtggtaataagtcaagaagataattgatataaatatcgtgtaattttacaaaattggcaacactaaactaagcctacttaaaattcataaaaattttagtaggtattccaaagatttgcgtgaataactacgttattccttcaacacactctttggtggtgtgtaaagttggtgattgcgtagtagcgcatcaaccaaacgcacaaattttctggcggttaaaacaatagctcggcggtgcttatttatcggggtttcggtatatttctttttataaaaagctgtgtattcaggtaagtgattttttaccgagttggcggcttcaactaagtaataacgtaaataatgattaccttgttttgttagtggtgtgacttctgactgataatttccagattgtttaactttccaggatagaccggcatatttggcgacttttgcttgatcatcaaatcgttcgatttgaccgacttcagctaagatacctgcggcataaaccttaccgattcctggcacactggttaagcattgatattcaggaattatttcaactagtttttcgatacctttatcaatttgtttaatactttgctgtaatgaacgcatttgaactaccaaggtactgagaataatatcaatcgactcattcattaatcgcggcaactgatagctatttttaatggcacgctgaatggttttaaccagtttttcaggatttttaaagttactgcggccaacattttgaatcaattggacgaagtcctctagtggtaaattggctaattcatctaatgagtagttttcagtcattaaatgtacaattgtggcgctaaaaatgccggtagattctgattttaattccttactaagcgtattacatttataagttaagttttctaagaaatgttgtttaaccgttactaattcggtaactagttgatatctagtacgggttaaacgttgaagtgccatatatttttcttctttgataggtgacgttgtaaaacgttgaattcgtaagtagtcagcaattcgcatggcatcattggtatcagttttgtcttcatcgaagacacgagaatattgcttgattttaaatgggttttcaacagtgactaccgttggtagtgcatttaagtctgcatcttcttggaaaaacatagctggatgaaaactatatagtgatgttgattccataccaatcacaatctgttcaaatgatacttctgcgtgatgttttaaaattaaggctttaatttcagaagcaccatttaaatcgttagcaacacttaaacgatttaggattgataagttactatcatcagtcataaaacaagcatcaatcttttcagaactaatatctaaaccaacaaataatttcacaggaaggacctcctttcgagagttatttggaacttgctttgatactgcgggattccccagaaaatctttacacagctacaacctcgcgtaacagaattttgaccaattggacttatgccgccttcaaactactacattgaagataagcctgattgaaaacagctagtgagttgggagagagcgtaaagactcgggtaacggacttactaaagtagagttaactacaggagtttttagcaaattcccgatagatccattccatggtcctattatattctgaagaatcccgcagtatcaaagtaataattaaattttattgtaagccaacggcttataaatatatcttacgaggagtctattatgggaaagaagaaaaagcaaaacgcattatccaaaacattagttgaaaaaattctagataaacaaaaagtggcctacacccaacttgaattcccaacagaggaagtccacaacgttgcccaaatgaaggtcgatcatctcgatatcgatgaacatcttatttataaaacattggtgctctctggtaagagtaccggcccaatcgtcggtgtcgtcccgattgattgtcatttagacgaaaaaaaattaagccaaatttctggcaacaaaaaaattgcgatggtcccattaagggagctcgtggccactactggctacgaacatggcgctaacacgcccgttggaatctgggaacaatcccactatccgatttacattgaccaacaggctgaaaaggaaccattcatctatgtctcatccggtaaaattggccgctcaattcagattaatccgcaagacttacagcgggtcactgaagccacctttgctgacatcagtgaagcctaaaaatatgataagaggggctagaacaattcacttgttctagcccctcttatttttgagtttaatctaagtattgggccaaattagcaccagaaatgatgacttgttccttcagcaaatttggttctttaataatattatgaaccaccgtttcgggtaaaacatcattttgtgcgagcatttgcagagcatcatcttgcatcacgacttttttaaccatattatgtattttaatcgttgcaacatatttttgcgattcccgttcttcaaccacttcgtagttgccgtaataatgtttatctgtcattaactcatccccttaaggttaataatatcatatttcaacaaataaaactaagtaacttatcctataataaggggaaactgttaaaaaataccaaaaaaaagcaaaacaataactgttttgctttttccattatagtaaggagagtacaggattatattaggactatattttaccgtagtaccagtatttctgtactcttctgggacaatattgggacaatagaatttaaaaggtagattgcaaatttaatccgaattttcggacaaatttgtcagcataacctgatacggtgtttgccagtcgagtattttaagcggtcgctggttaatttggagtaacgtcgtcgttaaatcttgagcactaatgtgctcaaaacgagtccctttaggataaaaataacgtaaattccgattaaagcgttcgttactaccacgttcagctggagtataagcatggcagtaataggtcttaataccatattgtgattcaagtgatactagtccactaaactcagtgccacggtccacagtaaagctgtgcaccggaccattaaaagtggttaggaacttagttagtgcttcattaacagtcgctgtcgtccgatcttttaaccggtatgcccaaaggaaccgtgatttgcgatcgattaaagttaataaaactgccttactatgcccacgaggaccaacgactgtatctagttcaaaatcgccgatgcgcttacgttgattaatcatcatgggacgctgttcaattgatcgccccaaagattgattatatttggatcgttggtcaacgttacgccgttggcgtacgccatgttcaggtagatcattcaaggagaaaccaattctcccctgatttagccaattataaatagatttagtagctagtttaaattcgtgagcaatcattcctggtgaccagcttagacgtaaatggttgagaattttttgctttaactcatcgctcagcttagttttccgaccacatcgtgatcgcttgtattcggcatctgtttgtgctaattcagcctgataaggttgacatcgagataattcataagaaattgttgacggtgatcggttcagccgaacgcccatttggatattggacagccctagttcacaaaaggtttcgattttaattcgttcggaataggttatactagacaaaagatcagctcctaaaagatgggtttgtggtaaacaccattttaaaggaagctgatcttttttgtccgaacggttcatctgaccaatctgttaaacaaaccatccaaataatcaagaagaatcatccagcgtacggttatcgtcgtgtaactggtgaattacatcgtatgaatatcttagtaaatcataaaaaagtacttgtcttaatgcgagaactgcaattactatcaactgcatttaacaaacgtactcgtaaatataattcatatagaggcaatgttggcaccgttgctaagaacttgatcaaccgtcgtttcttcactgatcgtccttatcaaaaactagtaacagacgttactgaagttcgctggggaaccaagacaattgatgaacgcgcctatttcacatgtatttatgatttattctcaggtgaaattctcagccatcaagttagtaaacaccctactgttgaatttactacaactgttttgaatcgagcagttaagaaaatccctaagaatttaaaataccggacaacagtccactcagatcaaggatttcaataccagcatcaagattggactcatatcttgaaagaacatcgcatttttcaaagtatgtctcgcaaagcaacatgtttagataatgcagcaatggagagctttttccatattatgaaagccgaagctttctaccaaaaagaaaccgatacttatgaaacgctagtttcacaaatatcggtttggattgatgattataattttcaagaattaaaacaaaactgggttgtaaaagtccgattgaatatcgaatttttacaacccagaaagctgcttaaagtttcgtccaatatttggggttcacttcacatcctagattagtagggggctcctatgatggaattacggacaaactgttcgatataatacatcataaaggagctttttattatggcaattaaatattcaaatgaatttaaagaatcgattgttagcttaagtcagactggccgttcggccaactcactggctaaagaatacaacgtcagtgtttcaacggtcactaagtggattaaacaagctgatcctaacaacactaaagtgctatcatcaaatgaacgtgctctgattaaagaaaataaacggttaaaagaagaacttgatattttaaaacgagcggcggtgctcatggcaaaaagctaattattaaagggcgtgccctcgtgttagaagtcgtcaacgctaatttacttgctgggcaccgcattacgcgtatcttatcagtactcaaaattccgcgctcaacctactatgattatctacattggcagccaagtagaactgaacgccgccggcatttaattaaacaagaagtgttaacggcttggttaagatatccaatgtatggctacccaagattaacgatcttactaaatcaacagtctgatattcacgttagtcagcgtctggtctatcaacaaatgtgtgaattagggattagatctagaatggttaaacgaatcaataagccaaccactcagactgattatgatcagcgaccaaacttgattaagcagttaactgatcaatctggtattttattgactgatattacgtacattccccttaaccatacttggtgttacctagctagtgtctataatccagtaacccgacgggttattgcttaccaacttaatacgcagatgactaaagaactagcgactaacgttattacccaagtcatggcgcaagcagttaaaccacaaattattcatagtgatatgggaagccaatacacaagtgacttatttgaaaacactttatcgaagtatggtatcaagcattcttactcccgaaagggtcagcccggcgataacgcgcgaattgaaagttttcattcaattttgaaacgtgaatacgttaatttccaagattttaagacaattcatgaagcaatcgccggaattgataactatattcgttggtataacagtgatcgtatttcacttgtagcgtagctacaggctattaaattcaataatgttggggcttatttaatatactctaaagcgtttttaaaatctgaacgggactaaaacttcggcctccgaaaattaaattaagtaatttaaattgaaagtcaaatttgttcgtacttttatgtccggattcttgacataggagcctggtttgacccatcagttatagctgtggatgttacttcttattgttttcattgactaagattgtcaatttttattttcaacgaagcaattgaatcagaaattaacttaatctgatccagtgtccacgtttgggttgcatatccgttgagatccttctgctcaattttcttagagatatcaagtcgcataccatccacggcttgagaaagattggagaccaccacatttaaacctaattgcagtttcatatttgaaaatgtaatagtggatgtcgaaggaatattatcaaggcggatataaacaccttgctgcgaaaacccatccagcgagatggttgccacataatgtctctttgtggtatcagtggtaccaacaatgtagttcatccaagttccaccgtctgtaccagaatcatccccatgtatatggggagcaccacgtctgtgtggcatagctcgataacgtgttagaatcatccccatgtatatggggagcacaaacaaaggcttgtacgcttagcgtatgtttcggaatcatccccatgtatatggggagcactgaatctggtttgattgacaaaggcgggcatcagaatcatccccatgtatatggggagcactgaattggtaatctcaatcttgccgactttgaagaatcatccccatgtatatggggagcactttgcgataactgtaattgacacgagtgcttcagaatcatccccatgtatatggggagcaccaaacctaccacgcccagaaaggagatgagtaagaatcatccccatgtatatggggagcacctgaaacgcatggctgacattgtcggagttacagaatcatccccatgtatatggggagcacactaaaaaaagcctttacataggcattttcaaattacaaggttgccgttttttattaacttctctgctaaagacaacgtagcttgagcatcagataatgcatgatgtggatctaaattctctatctgatatacttccaagacagtcgttaaacgatagttatctaaaaactcctgagttgtttttactattggcataagatcgtgggtagagttagtaaattcggtttttccaactttccgcaatgcttccgttaaaaacctttcatcaaattcaagattataaccgatgatgactgaatccttaacaaaatcagacaatgcctctaatcctaatgaaagctcaacaccctgtttttgcaactgttctgaagtaattccggtaagttcagtaattttggatggtactgaatccacacttcgaattaatttttcaaattgcagtaattgtccgtcgggcattatcttggctgctccaattgaaataatttctgctttagtactatccaatccagttgtttctaaatcaagtgccaccaaaggttttgataatataggctttacatcttttcgatatttagtcatacgtcgatgtgacattgtcatccctttatggaatttggccgcactactgaatccatgtttaactggcacctcttgttgctttaaatgcatcattaagggtataccatcataatcgaccacttgtcgatccttacgtgttgtccgaaactgatagcctaattcagtggcagcattatacgccattgttgcttcaccagtcccaatatttttcaaaatacgttcccagagtaggtcacggactcgtgcactgacattacctacatacacacctgtttgaatctcctgataccatttagtcaagtcaccacgaagtgaaggcggaactttagataaagtaacaacaatcattcgtcatcacctgccgttacatcatgatactgaactcccatcttctgcataccaagtttatcatcccaaagttgaaataaatctgcgccatcttgacaatcatctatgtttaatagatttttcaaatcagtcaccatctgagacaatagtttaccgtctcgaaaggcatctcgcatagctaatcgtgttctagctgctagatcttcgtcttgactatattttgcagtcatttcgaatgcaacaggaatagagatttttgctttatacaaatctgcaaaatcgtaaacaaaagataaatcgtgacctgtatgtacaaatcccaagcctggtgatgcccctaacgccacaattacactataactcaatccgtaaagtgcttgatgtgctgcagtcaaagcttgattaattggtgtacccgactcaaaattatctggattatactcacgacgattccagggtacatttgtttttcttgattctttgtgataaacacttcgaactctagcaccttctttgccacgaagttcttgcatagacaaccccgaaacatcttgatcaggaaagcgcatctgatacatcttacgcgcaacagcaactctagtacgttgattcgaaactaattttgcttgtgcttgtaataaacgtgatgagtggttcaaagcgcgaccatgagcatatgcacgtactccttgctcaccaacccagactacagccatagctgaatctccaattaattccatagctctatgagttacattaaccccagggcccaacaataagacactcaccatagcagctggaatacatacaattccacgttgatccgtcacttgaatagcactatcctgcctattaacatcagcatgttctaaatataaaaaggtcatacgatcttgtacacgaccaagttcagaaatttctggcttattagcacccatttttctttctgacatattaagcctccggaataacagtcatcattcccataccaaaagctttctcacgtccaattccctttactaaagtctgtttaaaagtctctgcattttcaacgcgtaacagaccttcaaacgttactcgactgagacgaacggctcgtcctggattacggtgtaacattggccaatcacgttcgacaattttaaaagcgagcgtctgcgtttcatttaagtcattaacaccaacttgtttgaccaattcaaatccagacttatctgatcgatctaccaaccatttttcctgttgagtaactgtaacatgagggaaaactttcccacgtttttttccaggacgtgtaatcgtatgtgtgggattagccgtcaatcggaaacgcataatctgaccatcatgaattttgtctaagaatccatcgtatgatttagtcacaatagttcctgtaacaccatatttcaataaaaactcagaatcaggtatggattcactcatgatcaataaatactttttccccgctaatgtatccaaacgccacaaatgtctatgacgttctccggtcgctatttcctttggaaagctctgctcaacccagttatgatatgcacctaaatgagtaagatctttgatttttgcacgattttgaacatcaacttcaactcttgataaataatacatagactacccccctttctaaagtgcacttaatgcatcatgttctgttgattcatcaactgctatacaagaatatgtcagttgaactcgttctgttgacattgctcgataaccaaagtatcgatttctttgatcaaatgaacccactcgatctttaaccattacactatgatgatcgttaagtaaatttgcatctgcatatatatcaactttgggaaacattttaccaggattttgttttcgataaactttttgagaccaaggtgaaacttgccaacctaaattttccagaactgttacagggtttttatcgtcaagttcttccattagaagaactcctgctggaacattagctcgacgccccaagaacaactgataatgcggatgacgcagtgcattgtgaatttttgtaatttgttgatcatcattacttcccacggcaactacaaatactgcatcttgtatgtaatcgcgataagtaattttgcgaacattctttttccattcaacagtatgaaaatcagttaacatttgtccagcttggtcaattcgtacagcaaaattcaaatcattcaattgcgagattcgtggatcctctcttgaataacccaaagccgctgcaatcattccaataattgaactttttgaaggataatctccggttgtccgccgttcaaacgtagcctcatcaccataggattgtaaaggcgacgtcaatctaatcgttagtattttcatcctcaaccaccttcgtcaactccgtcgtaacctgttccaagagatcagacaagtttgttgctgtcttgctagcttctgtactgtatttactcaaagctaccgtcaataacggttgatctacaaaatccagtgtctgcttatactcgttctctagtcgttcaacagatttttcaacataaccatcgttagatacaactggtttttcgaatgccgaaactaaattgacaggtgtatcttgtcgaatcgtaaccatgacatagtttggaagcgttttgtttgcaaaagtattctgttttccagttggcattgatagggcaaaatctttgataaaagcagatataccagcgatggcatcttctttattcagattatgtactaattcattgacattcacgttagcataccgatatagtgtggccgaattaaactcaatagttcctaacatagcggctccactagtatcttcaccttgttcatcatctaaggcagtaaagtaatcatattcaggaatcacttcatgagttgaaattgcatgagcaacttgtgaggcggcatcaacatttaattcaggattatcagctaccattcgaccaaataaagctaaatcgagggattggtcccccttaagaacttttttaatttcttttttatcgagttcatcattattgagtatatactgagccaattttttaatttgaccattactaattaaaagtaaagcacccgtctcattatttttgtcaaccttgatgccagctgatttaaaagcttcattagctttggttaaagcagcttcttcatcaagagaaccatcttgcttacgtaactcattagccaataattgaacagactcttttgttcgtgaactaaatgtcacatgatcttccttaaatgcatggcgtacgacgtgtttccaactttgtgaagaaactcgagctctcgtaacaccaccatacaaagcggtcttaggtgctcctgtatcatctcgatttaaattagatgatggaacagtttgaatgatatttatgtctaaatataaattattggtcattagtttttctccccttcagttgttttctgatttttcgtgctccaatagtactgctgcccccagcgcaaatgaacttggttcgcaacatcaacaccaaattgtgcatcatataaatcttgtgctaataaggcataatcaattctaattgttggattagtggcttttaaaatactaaccaaatgagataaagactgaatcatactagccacattacttgttgccaagagtgctttcactcgacgatccagagcttcttgacgatctggttgatttcttaactgagcaagcgctttaaataaactcactcctttattctcatcatccccgtgaactgaactgtaaacaaattgtgtttgtccttgttgatgaatcgcataaaaacgaatggctgcatatactgccgtttccgcataagtgggacgaccatcgcgacttaacatcttttcatccagattagccatcatcactggccaaacagactgtgcttgccgacttaacagcgtagcagcacctcgaacatttgataaaacagctttgtctggttttccatctctccaaagactccgaattattctatcggtaaccttttctatttttcccataacgatatatcactccttatcctgaggccctaaatgtatgcgaacattataatttagtcttcttcgagcggtaaaaatattcaacaaacggcctttatcatcctcaataccactgacgtccctaggagaactagacttcatgacatcacgaactgtgtcatttaaaatatcttctaattgctctttccattgttcaattttttgttctctgtcatcatcaccagtcaattgggatagccattctttaaatggagcattcaatttctgataaaaactggcacttaaattgctggcaaatgaacgcgcatccacattacgtatttgaccaattgttgaagcaaaatggtaaaaatctgttccaatcatttgagttgtatctatagcatcttcaattcgtacaggccaatattccgcaatttcaggatcaaacaacacgtctgattgtaatcgtatatcatcggctacttcaaccgctggagcctgtgaggtcgcattaccatcgctgatcagagttgttgaagctaatgttaacaattgatcatctgcaatgactgatgtatcttgatcttttatatcatgcaaccaactaacaattccaggttccaattgtcctgaattgctgtgaacatcaacgtaattaccaaagtttctccacatagaaatactcaacgagcgaagactcttaacagcaggacgatattcccctgtttttttgtctactctccacgttgtcattggctcaataaaagcacccgtagcttcaaaaattggaatccctgcactaaaaattaatggatgcttattatcttgccattcaatatgaagaattcgtgaccaagttgtataaagctctgctagattatccggtaccacctgttgtttacgaacagcaatgtaatcttgaatctcatactcccaaactggcttttgtaaggctaacgggtctacttgttcaccacctaatttcagattcaacattagagtttcaaatacagtctgtccttgggcataaactggattgatccgatacaaccaacccgcagaattggaaaacttttctttcgtctcaattttggttttgtcagttacacctgtaaagttttgataagtaatcaaccaacgcacaagttcatcaatatcaattgaattcttccgttcgcccgtttttggagcaaaaattgatggcgtattcccactttccgaaatacgtcgattaagttgtttaactagtacctgaccttttcctttttcgactcgtttattactaggaactagagcgtcatagtcagcggtcgtcacttgataaaagggatgatcaccaaacatatcaaagcgattatcgtaacacttcaaataatctgtcacaattttagaaaattttcctgctcgatagagtttgttccacgtatcgagtaaatcttcattaatatcctcagcatctgtatcatcatcaacatctgttgcttgcattgtgtcagaatccacggtaatccaagaatatggcatattgccagcattataacgcgaatatactgtagtcaaaattgctaacaaaaaacgcataattgctaaatcctgtgagcgcatttctccggccaattgacgatagtcttgtgcatgactaaaaaattcaatcagtgatacagacttctcccgtcctgtatcagtctgtatcactttaatccaaggatctgttgtcaaattaaagctctgactcatcatatttactcatcctcctttgtataatttaatcctaaatcttctgaatacattaatcgccagttgccaagagttgctgataaattatcatccaacggcaatgccaaggccccacttaaccatgggctctcttgccatttatcaaagtattctgcagttttatcttctagatcatttataactttagtaatcacggcagcattaggcgtaatggccattggtagacgaattacttgttcagatatttcacgatctgaaacgtctcttaatgaccgtccatccactaaatattgtccttttgctgtacattgtatcaagataacctcaaccgtttcttgaatatctcttaccgccgcattagcactttgttcatctttatttaaattacggaaatcataatctaaccaaccatgaatagtcgatttaagtctaaattttggtgccgcaatttggaaaacgtttgaacgctgtttttcttgtgcttgatctttatctaacttaattctcgattctccgatttctggaattaaatcatccgtttttggatcgtatacttcctgtactaacttggaaatatcgttcggtagagttaccgtatcttgcaaaaaatagtcagtcttcatcaaaagatacttttcataaatagcttcattagcatcgccatattcatatggggcttgaattcccataacaaataattctggaatattcaaagtttcaggtctttgaatatcatgccgatgtaaacgaccagcacgttgtaaaatcaaatcaatgggagcaatatccgtatataaaacatcaaaatcaatatcaagcgactgttccaatacttgagttccaatcacaatcattttgtgtgggcgatgaccgtctttaccaataagtctttgcaatttttcctcttgcttagacctttcaggtgctaagaatgcggagtgcaataccatcaagggagtatcgcccatagtttgattctgctgaaatgctttggcaagaacttgtgctcttttaacagtattgacaataataccagctactccgccctgttttattttatctgtaactgcttgaaccaattcttcatcattcacgtttaaacgttgtacatgcaaatgagtagatttttgattcttctgatcaaatttagttagttgttttaattcaggtccgtccaaaattgtcagtaacggataagattgcgttgtcttccatccatctttaacaattaatcgattctgatagtttaaaccatattttccttttaagtacgctttaaccagctgatttcgtttttcaactggcaaagttgcagagagaataattaccggcacatgataagctcctaaccagttcatagctttaaagagataactagacatatatgtatcatacgcatgtacctcatcaataacgacaacttttccactgaatccaagatgacgtaaaaaaagatgcttcttttttagtcccatacgtaatagattatcaatagttcctactgtaaaatctgtcagaattgattttttacctgtaaaccaactgttaacaaccactgatccagtttgatgttgcttgccattttcactctgctcataaatattgctagcctctggcaaattagtgaattctgaattatattgtcgtttactctgcatcaaatcaatttgtaatttttttccttcatcatcagccaaaaattttgtccactcaagcactcgcgtaaacatagcattggttgttgcttgcgttggcaaccccataaaaaatccatttctgccagttttatacgcaagttgttccgctgcaattaaagatatttctgtttttccaaggcccatacccgcttcaacaattacaagtccgggatcagttgtagcctgaattgcttgagtcatagctaattgaaccgggcgtggagtatatccccaatgattaaaatatggattagtattatcattcagtatcaccttttgtggaacccatttgtctgattgcttccacgttaaaatggcattctcaaatcgacttgtcatatctatgtcttgataaccttgatcaagcccaattagtggaaacagaggtttagatcgatcttcattcaaccactcacttgaagatagccaatctgccataatcagaagtccttctaagataactgcctgtggttgtccaacctctggaatttcaccagcctcagtatatccagctaaattcattccataatcaaataaccgttgtcgagtatcttgccaagcttgtttttcttcctgtcgacgttcttcctcaataggatctttaacatgcccatcaacttgatcgtagttggcagtataattttccaattgaattctgagattatgtttttcagccggtttaccatgatgacctccaatgatagcccctacggaagcaggaatattaaatgcatcactttctaagattgcttctccagctaatgcatgaggtgatttttgtggagatgataatccagatactcgtaattcagaaaaaccatttcgattcaagcgttcaatcaactcttcatcaagcgaggcattattatcgtaagatttttttgtttgaaaagctggtgtggctttcccaatatcatgaaagaatcccaaaaatttaattagcttttgcatgtcttcttcagaaaccgactgagttaacaattctctttgaccggcatttaaccaatgataaaaaagccaattcatcacatgactgcaatctactaagtgggcaactaatggaagccacaacatttccccatcatctacatgtttttttgcccataaactagtttctctactcgttaattttactgacatttaatatttcccctttttagagagattatctttcaaatttatctacgcaaacggcaatgtaatcgttatctttattatgccactattaatatagttagacttgtaagaaatgaaaatttactttctaatatctaacctcattacaaattagctcatgactaaatctatttacggtacaatttcacttctgaaaaaattatgataaaaaagagcacttggccctaattaaaaccatcccatgtatatggggaacaccttaaaagcattattgaatttttgcgatgaatagaatcatccccatatacatggggagtacactattttactcaattataccacttcacttacagaatcatccccatatacatggggagtaccaatgttgatgcggccgcagcgctcggcattaagaatcatccccatatacatggggagtaccttagctctaacgcctgatgggaagtcttactagaatcatccccatatacatggggagtacaatcgggcaatatctgagttaggcccactagcagaatcatccccatatacatggggagtacctgttcctttagcaacgaagcattgggtggttggaatcatccccatatacatggggagtacatacaagtattcaatgccatcagatatgtataggaatcatccccatatgcatggggagtaccgagattttgtatcgagtaatcaaatcgctaaagaatcatccccatatacatggggagtacatgaaggacattacaacgattgcgcgcgctaaggaatcatccccatatacatggggagtacgctaacaaatatgctgtaaacttacttctgccagaatcatccccatatacatggggagtacttaatacaatctgataaataaattctaccccaagaatcatccccatatacatggggagtacgcgggtgccttgtctctgaattgcttactaatagaatcatccccatatacatggggagtaccccgctaacgcaaacactaagttgggatctttggaatcatccccatatacatggggagtacaaagctacaacgaagttaacacggcgcctaaaggaatcatccccatatacatggggagtactattgtttagctcgtctagttgtttttgtgtcagaatcatccccatatacatggggagtactcaattggttacaatggcgacacgtcaccattagaatcatccccatatacatggggagtactagaaaaaaacatcctttctgttaagttatttagaatcatccccatatacatggggagtacatgagtatgattacaactattgaaaaatggcaagaatcatccccatatacatggggagtacaaggctaatccttccaaagagctcaaccgtttggaatcatccccatatacatggggagtacgctacttgtttagttgttgtttttgttttcccggaatcatccccatatacatggggagtactttaatattattataatactcaaccgttacggggaatcatccccatatacatggggagtaccgatctcaaattagtattcttaaattacaagctgaatcatccccatatacatggggagtactagtggacaaatatcaatttaatgttaaatacagaatcatccccatatacatggggagtacagaaactgaatgagacgcagcgtcaagcaacaggaatcatccccatatacatggggagtacataacaatcttagaatctggaatgcccaaactagaatcatccccatatacatggggagtacttgatataagaagaacggttcattccgattttggaatcatccccatatacatggggagtacaaacagccaagttagtgtctaaagcgactaagagaatcatccccatatacatggggagtactctagaatcacaccccgtttctgtgtgtccggagaatcatccccatatacatggggagtacttgaagccgatgtggaagcacgagcagaagcaagaatcatccccatatacatggggagtacgaagacacgtccgcgccagtagtcatagtgttggaatcatccccatatacatggggagtactgtcaatgatgttaatcgggttgccccttggaagaatcatccccatatacatggggagtacagctggtctgattgattctgctggtccatctgagaatcatccccatatacatggggagtacgggtttggcgtgtttttgtgttttttccttccagaatcatccccatatacatggggagtactgtacttgctctgttgttatcaatgtcgattaagaatcatccccatatacatggggagtaccatttgtggtacaatcactgtataaatgttttagaatcatccccatatacatggggagtactcaaaacgagcattggtacaattgcgccacaaagaatcatccccatatacatggggagtacaagttattggtgaaactgaaaaggctgttcaaagaatcatccccatatacatggggagtactacaaaaatgaccgaattattgcttacgttacggaatcatccccatatacatggggagtacttaacccaccgaccgttgtaattgattgaacaggaatcatccccatatacatggggagtacgagattggtcaaaacgtgcttgacttagagacagaatcatccccatatacatggggagtacattggcaaaagtttctgggactgctgttattgagaatcatccccatatacatggggagtacttgttgctatcgcagctgttgctggtggggctagaatcatccccatatacatggggagtacttagtgttgtaatacgtatcaaggtaccattcggaatcatccccatatacatggggagtacactaagaaaagactgttagatcaacattttaaaattagaaaaccacttatttttattaactggtccaataagattaccaatttcttaaatcatacctttctttcctgttctatgcaacgctattttcaatagtttcaatgactaggcaaattacaagtttaatccgaacaagcccggaatctttcaatggcagtctgttgatgatgtatttttaatggtcgttgattaattagttcaagtgctgctaggatctcatcagtcgttacttggctaaaattggtctttttcgggaagaaccagcgtaaccgtctattaaaatattcattggaacctcgctcccatggtgaatatggatggcaaaaataaactttgatctgataatcctgttctaaggcctgataattggcaaactctttaccatgatcaacagtaatggattttacttggggaccgaaggcccccataaacttgccaaaggcggtgtttagagccttagccgttctattaggggctttgatggcccatagaagtcgggtcttacgttctacgaatgtaaccagacatgatcgtgactcacttcgactagaaagcaccgtatctacttcccaatgaccaaaagctaaccgttgattaacagttgttggccgttgttcgatggaagtcccacttgtaaatttcccacgattttcgctcactcggtgctggcggacattccgattgggtagatcagtcaatttgaaggggagccagccacgattaagccaattataaattgacgcagtgctcaagttataagcggccgcaatggtttctggtgaccaggttaatcgtaagtgattggtaattaaagtcgctaatgctgccgtcagcatcgaacgacgaccgcaattccgccttttgcgatccgcatcttgctgagctaattctggatcataaggtttaactcggtccaactcatagctaatcgtagctttggcgacgcctaaggcgtcagccattacttggtaagatttattcccctcattgaccagttgtgctagtgcgccacgttgaaaacgtgataaagtagatgtacccaaagtaatcactccctatattggttggaattagctactaccattgtaagtgattgctttgggctttttaatttctgttcggattaattatagaatttgccaaataaaaaaatcttccttatcccttttgtatcaacatttttagcactttaagacaaaaaaatagaacacttaaaagtgttctaaaatcgcttatttaaggagagtacaggatttgaacctgcgcgccggtataagccggttcgacggatttcgagtccgttgcattaccactctgccaactctccagaacgttatttattataacagacttctaaagaactgaacagcgtaaaacgcaaaaaaacctacgtgcgcccacattctattcgatcaccagcatcccatcttgatcaaattgccagtcctttgaataagcgacttcccaatagtaaccatcgggatcactgaaataaccactatagccaccccactcgccccattctggcgctttgatgagcgtggccccgttagcgagagctgttttaaatgttgcatcgacttccgcttgactatgcgtattaaaggcatgggtcacgccgttgaacgttcttggaaatggatgattatctgcggataagccaatatcggctagtagtgcagtgtacggaaacaattccaacttggtcccagtattattgaaaaagacgattgtctcagcattttctaaattcggcgcttgaaagccgagtgcttggtaaaactgacgtgacacggttaaatcctgaacacctaaacaaattaaatggatactatccatcaaatcacctactcgttttaaattaacctgattgtatcaatccgaagctaataacgcaatttcccccgttaattgaccaattattaaatttattgaatcatatttctttttataaaaaaattcgttatacttaaagaatcttaaatgatagaggtttattaatatgaagatttcttatcgcaaactaccgtttttattcaacttaattttcttagttgtaacggttttacaatctttgatcattctagtggttaacccccacgttacgaaattcatccccacttatatggatgccatggcgaaagtatggtggttgtgcattattgctattattttgcatattgttgcttatttattatcactcgatcagaatttgattttactggcatacttatgtgcaatcgtcgcttacatcatcttgattttagtccctaatttattactagttgcccttttcttgttagtggttagcttgatcatttcatttaaagtctatcatttccattatcgaacacctgcttagtcctcgtcggagggctatttttttatgcgctaacccatttaatttatggtataattagtttgaaattaagacaaaagaggttctagtaatgaaacgactaactgcgattctatctttattggtactttgtttactgccttttgtaagcccttacttcttcggcaaaggcatgcgcttttctagtaatcatcaaaaaaatccaatccgctttgaagtttgtcggcatccaaaggtccaccacgcagtcgatcgtgatggcagtgaacaaaaattaaacgccttcaaccaccgctgcgaacggttctttaatcaactcacacttgcgcctgaagcattctacgccgtagctggatttcttggatttaccgtctttattctattattagaaccactacttgcactcctaatgaccctcaagaaagtgctgcaacccaaaaaggcacaatcccatactccgcagaagcatcagattgcgccttataagtggcatttattagattagtttaagttcaacttttgataagtataatggccctcttttagtgattgattcgcatatggcgtctcattgagcaacgccacatattcttgggcccgttgttccgaactaaacgcccggatcattttacttttatcataataaagtgggtttgcttgatataaaacaacgtagatccattgattcatctgtcatcacctaactttgtaatccacataaagaaagaccaactcgtaatgagtcggccttttttaatgtcatcttaacgacgagcttctttgatacgagctgccttaccacgtaatgcgcgtaagtagtataacttagcacgacgtacacggccatgacgagtaacttcgatttgagcaacacgtggtgagtgtaatgggaaagttctttccacacccacaccgctactgattttacgaactgtgtaagtttcactcacgccaacaccatgacgtttgataacaacaccttcgaataattggatacgttcgcgagtaccttcgacaacacgcacgtgaacacgtacgttgtccccaggacggaagtcaggaatatctgaacgtaattgagacttagtaatttcttgaattaatggattcattttgaatctctcctttttccacagatattcattaacgtcttgcgccagcggaataccgttgttttgtgactaatcatcacaatttttaattttagcataattcaactgagaataaaagccttatttttcagccgcttcttgcttaatttcttgtaaccagtgcaactgatccttggtcaacgtcatcttctctagtaagtccggacgccgttcatatgtccgtttcaaggacatcttctcgcgccactcgttaatgagcttatgatttccgttcatcaagacttcaggtacctttaaaccgcggtattctggtggtcgcgtatattgtggatgttccaataagccggtcgaaaaagaatccgtaaccgctgattgttcattccccaagacgccaggtacaagccgcgaaatggcatcaatcatcaccattgcgcccaattcgcctccagtgacgacgaaatcgcccaatgagacttcatcagtgactagcgtgcgaatccgttcatcatagccctcgtaatgcccacagataaaaaccaagtggtcttcttgagcaaattcttcggcaactttttggttaaacgttaccccagctggatcgagcaaaataacccgtttgtgccccggattcttggcattcacttgatccatcgcctcaaaaatcggttgtggtcggagcaacatccccgcacctccaccatacggcgcatcatcaaccgaattgtgtttattgactgaaaaatcacggaaatccgtcacttctaaatcaattaagtcacgatcaattgccttaccgataattgattgggataacccattttgaaccatatctggaaataaacttaagacatcaatcttcattatcaatcaatccttctggtacttcaacgtaggctttacccgcttcaatatcaattttcttaacgactgacttcaaaaatggtaagagtaagtctgaacggccgcggcgcttgatcacccagacatcgttgggacctggatcgatgatttctgagactttcccatagctggtcccatcggcttcttcaaccacttctaagccgataatatcaccgtagtaaaactcatcatcttccagatcatcttcgcgttgacttgcagcaatctttaaattatggcccttgaactgttcaacatcgttgatattgcccattccttcgaactgtaatagatagaattgcttgtgttggcgcattgccgccactttaacatcaacaaggccattgggcatttcgacggccagttgcacgccttttttaaatcgtgaatccgtaaagtcagtcgtcgcaatgacccgcacttcaccacggatgccgtgggtattgacaattttaccaacttgatagtatttttctggcatttaatttctccttaatcgacaaaaaacgcctaaataaaacatctctgcttcatttaaacgtttttgttaggcatctacaatatttaaacggacccgtttttggtatggtgctttcacactatagacaatggtacggatggactgtgcaacccgtccctgcttgccaatgacgcgaccgatatcacttggattaacctgtaagtcaaattccataaaacgttctgtctcatgttcagtcaatttgacgtcttccggatgttcgacaagtggctgaacaattgcaataattagttccttcacgtctgtcataacgaatccctactttttagcgaagcgtgcttcgtgatatttttgcataatcccttgttttgataaaagattacgaacagtatcagaaggttgtgcgcctttttgtaaccaatccatgataacttcttcttctaacttcaagtcaactggttttgttaatggattgtagtaacctacttgttggataaagcgaccatcacgtggtgaacgtgaatctgcaacaacgatacggtagaatgggcgtttctttgaacccatacgtttcatacgaattttaactgacattaatgccacctcctattaattctttaacatgtcataatataccaaatttcaaacgccgtgtaaagtgttttttctttacaggacaaatttttttaagatttaaaacgacgcgcgttcttgagacgtttcttcttgtttttcttttgttttttcatcattgaattcatggccatcttacccattttacccttgataccgttgcccattaaaccttccatgccgttaaagttgccctttgacatttggttcatcatctttttcgattgattgaattgtttgatcatccggttaacttcaacgattgggcgaccagcaccagccgctaaacgacgacggcgactaggattcaataagtcaggattttcccgttcttgtggcgtcattgattgaacgatggccttcatatgcgccatgtctttcggatccatcttgatgttcttgagttgtgggttattagccatccctggaatcatcttcatgatatcttccaaaggtcccatgctctgcaattgatccatctgatccaagaaatcgttaaaatcaaagctattttctttgatcttttcagccatatcagctgctttttgctcgtcataatcttgttgcgctttttcaatcaggctcaacatgtcacccatcccaaggattcggctactcatccgatctggatagaaaatgtcgagttgatcaagtttttcaccttgaccagtgaacttaattggtttgccggtgactgcacgaattgagagggctgccccaccacgtgtgtcgccatctaacttggttagaacgaccccggtgacatctaaacgactgttaaagccttcagcaacatcgacagcggcttgcccagtcatggcatcgaccgttaagaggatttcatttggatgggctagctcattaatatcagccaattcttgcatcaaggcttcgtcaatttgtaaacgaccagccgtatcaattaagacgtaatcgttcttttgtaaggccgcttgtgctaacccttgacggacgatttcaactgggttgacatccgtccccatttcaaagacttgtgcgtcaacttgcttgccgacggtcttcaattgttcaatcgcagctggccgataaacatcggcggcaatcatcaatggccgtgctttttcgttttggattaaatattttgctaatttcccggccgtggttgttttcccggccccttgtaacccaaccatcataatgattgttggaatatgtggtgatttattcaacggcacagccgtttcacccatcatcttcgttaattcttcatcaacgatttttacaatttgttgtgcaggtgataagctatcaaggacttctgccccgatggcgcgttccttgacgactttaataaagtctttaaccactttaaagttaacgtcggcttctaataatgccagccgaatctcgcgcatcgcttgattgacgtctgtttcggtaatcttccctttacgccgaagcttactcaatgcgccttgtagtcgttctgttagcccttcaaatgccattttttatcagtcctttaagttaattattgttcggttaaattcagtaagtcagccaacaagcgcatcagttcttgatcgtctggatagtgcgcttgaatatacttttgtagcgtatctgcactggcattttgctgttcataattacggtaaagatgtagcttttcttcgtaaccctctaagattttttcagtccggcgaatgttgtcatagaccgcttgccgactaacattgtattcagcagcaatttcaccgagggaaaaatcatccccataatataaagagatataactatgttgttttgccgttaaaagtgcgccataaaattcgaacaacgaattcatgcgtgcgttttgtgcgagttccatttgacgcctcctagacttagtttgacctaactattagagtaccgattttaacgggcttagtcaacgttttattgcgtgtttcgactagaagtttgtgcataaattatcttttcactggtataaacaaaaaatcatgctaaaatagaagtgtaagctttttcataacttaaattgaaatttctacggaggttgtatgatggcagcaacaattatctattggggcgttatattcgcattaattggttggggactctggaacttaatcttctcaatcgtctatttaaagaacaaggaaaatggtaatctttggttcttcgccattttaaacaccttaaccttattattcgggctattattctggtgggtcttcaacaatcacgcttggcaagaatactggttggttaaagcaaccgcaaccaacagtctactaggtggcgttttaatcgcctatgtcgtcttaattatcgcccaagtgattttgggacgcgaaccaaaagccaaaacagcttaatcattcattcaaaaaagcgtctgacaagaaattgtcgaacgctttttcttattgcctattgaaataacaaatcaatataaaccgaaatgattagaagatctgcactgccacctaaactgtaatggccccgcgttgcttcgtgatctaatttcattaatccttgctgacccgtttcagtttcgatcccaccagcagcaataatcgctgccgcttgcttttgaacatctctcaaggtttgtaaactgccgctacgcttaacaagatttgaatcttctgaaacactaatgatttttattagtgtgttcactaaccgcgtattccaatcacccgtctgcgtctttaagtaagggtacgctgtttcaaatatggttggataccccgcctgtgcttcgccacggatcccaactaatccgtattgcaggtagagtttctcaccatttgttagccgcgccggttccttttgactaagggccttgaaatcattctcaaccaatcccgccaacattgcttgaactgtttgacttaatttcagtggtgtcaatgttgatttttgcagtagataccccgtcgcactcaacaaaattcctagtgagaatatcgcccctttatgcgtattcacacctttggttgctgacaacatcgcgtcttccgctcgcataccaagcggccgaatttgagccattagtgctgttaaatccgattgctcaaacgtactacccacctgaacaaattgttcaaaaaacggtagtaacgcgacactactatcgataaacgtgaacagatccatatcggtgtgcgtttgatgatcgatgggatccactaaaccaggtttgggatagcagctcacttcatacaatagtgcacgttgcgcaagctgcgcgattgcttgggatgttttcatctaattcgtctccatcaataattgataatgttggttaattgcagcttgtagttctgccactgtatggcgtcgacttcttgcacaaacctttgccggctgatcacataacaagcatcggcgtgctggctgtccaaaatcttgccgactcacaggttgtgcttgttgcaaatcagcttgccaagttagcacatcgacgtcaaataaccggcctaatggatgctggtcttcaaaaataacagcgcgttgcttaatcttttctggtgagccatcaaccaccaaaaacgcttcgggacctgttggctgatcccaatcaatttgccgttgaattgttaatgcttgtttaaaagtggcaaagcctgtcttaaacagctgcgtcagtgccgcattattcttaatgggaccaggaatattgagcttgagtgtcacgacacttttatcggatgacgtcgaacgcaccaatttattttgtaaagccgcacgctgatcacgattggctaggaccgcattaatctcttgtggtgtgccagttgcaaacagattaatcatccgactagtcctttacttgatacacaacgtccattaaagtgccatcacgatactcaaccaaagcaactggcttatcggtgaaggctaatggtgttgcttgtccaacaattttagcggctttttgccgtaattcatcgatcgtgaacactggtacgcccggaatattgcttaatgcttcaatcaaatcatggcgtttggggttaatcgcaatccctaattcagtgaccaagacatcgattgaatcacctggcgtaacaacggttgtcacatcatcaacaatcgttgcaattcgtcctctgacaattggtgcagaaataattgttaacttcgcattggccgcgtcttgatggccaccgattgcccctcgtaaaacgccatctgaaccagtcataacgttcacgttaaacttcgtatcaatttcaagtgctgacaagatgcagacatctaattggttgaccgcagcccctttattataaggatctgcataccaagaagcatcaatttcttgttgattttcagtggttgccatactatcggccgcgcctttatcaaaatcctgcacgtctaagattttatccactaagccttcgttgagtaaatcaacagttggcttcgtaatcccgcctaaagcgaatgaagcggtaatggacttcttcaacattgattcgcgcaaataacgcgtaacagctaatgcagcgccacctgaacctgtttggaatgagaaaccttgtttgaagtaaggtgagtgtgtaataacggcattcaccatttctgcaattttcaattccttaggatccttggtaaagcgagttgcacctgaaccaattttttcagggtccccaacttgatcaacttttacaacataatcaacttgcgtttgcttgatgctggctggtgtattgggatatggcataatcgtatccgttaacaaaacaaccttatctgcatattgtgcatccatcaatgcatagccgagtgagccgaagacagcgtcacctttaatcgcgttcgcattaccgacttcatcagcattaggaacacctaagaacgcaacatcaatcttgatatcaccactttcgatggcccgtgcacggttcccatgtgagcgtaaaataactgggttttctaatccaccgtgtgagactaaatcccctaattcgccacgcatcccagaagaagtaatatgggtcaccacaccagccttgattgctttaacaaccatcttgttcatcacgttagtcagtgaacttggggctaacgttaagtctttaaaaccttggtcaatcaaaatttgcatgaccgcgttaaaaacatagtctccttcacggaaatgatgatggaatgaaatggtcatcccattttttagacccactttttgaatcacatcttcaatcgatgaaactaatttcgcgtgtccctgatcagctgttaccttaggggcgacacgttgaatttcaggatgaccgatttcaaccgtttcaaatggttggtaagccattgtttgcattaaatcatctggtaattcgcgttgtactttattcagcataccaatttccctcctgatcaactaaatgtgatgcttccgccaacatcatggcccgttgcgcacgcgccacaattggtttatcaaccattttcccatttaatgaaataacgccagagcccttaatccgtgcttcttcaatggcgtttaaaacgtcttttgcattttgaacatctttttcagttggggcataaatggcattcactaacggaatttggcgtggattaataactgatttgccgtcaaaaccaagttcgtgaatcaactcaacttcgtgattaaagcccgcttcgttatcaacatccgagtaaactgtatcaaacgccgcaatgccggctgctcgtgcaccatgaagaatcatattccgtgcaaatgaaagttctgcgccatcaggataacgatgcgtcttcatgtttgtcacataatcttcggcaccaattgcaatcccaattaatcgatctgaagctttggcaatcgctggcgcattcaagaccccttcggcactttcaatggctgccatcattttagttgttttagccggaatcttaaaataatgctcggcttcagcaataacggcttcggtttcaataacatcgtcaaccgtttccgtcttgggtagccgaatcacatcgacgccagccttgaccattgcaaagatatcagggcgcccaaaaggtgtttctaacccattaatccgtacgactaattctgtttcaccgtaatcaaccgtttgtaaagcctgcattactagcattctagccgcatctttttcggcaagtgaaactgaatcttctaaatcaaacatgactgaatcagcaccgtaaataccggcatcctttaacattccagggttattacctggcacaaacatcatcgtccgtcgcaaacgttccattagccaagcacctcccaatctggatcattttctttatcagttgcccgttgaatcaccgtgattagtcgcgctttaatggtgcaatctagcgcgcctttgtcgacagccttaattttgacatttgtaatgccgtattgatctaagatggtttgcattaaagtccgaatttgagctccaaattgtttttcaacagcactttctaattcgatttcagttgcaccttcaaccttagaaagcatgatttgaatatcactcgactctaacgttcctgcaattgcagtatgtttaatttccatcaacttgcatccctttctgaattctggcttgtaaactagcctggttttgcttaataaattggtaagttgtatctggtacaaaattttgaacggtttcaatcatgcccgcttgaacggcttgtctaacccgcgtggcagagataacctggtctgccgcctgtcgtcttggaatcaccttaacagtcacttcaggtggcaaattagtcgccaatgcttgattgtataatgccgttgttttggaaaatggttcttcccctaaaaagcgatattgaatgtttaactgtgccgcaatttttttaaataattgggcatccaaggcggtttgatatccaatcacatcttgtgattctggtaaaaagtaagcagggaaggtcgcataactaaccatatagtcgcttgttgggactaccaccacattcgttaaatccgcgaccccttgttgaacgagtttgaagcgttcggcggttgtaaacagcgagacatcttgactaaccacaaaaacataaacgaaatcactcgcctttgccgcctgctccactaaatagcggtgccctaatgtgaatggattggcattcataacaatcgcactaattgcggcttgcgtttgtttctgaacccttggtcttggtacctgtgcaataaattgttgtagcgaaacatcacccgtttctagcaaaacagcgacgtcagtttccgccaataaattaaacccgacaaattcaaagctttgtcgatatttttgtttcgtaaacacaaagatgtgaaaaatacctttttgcgccaacgcgctaattaatgtcgaaataatggcattaaataacttgccatcttgataatgatgatcgaccgcaatgtactttagcacatttttctgataggcccccgtcgcaatgagctgctgcccttcaaaaataccaaagcacgcctctacatcattcacggtttggggtaacccttcaatcccctcttgtgtcagtaacgtgacccattgttgataataatgagtttctttcaaattaagctgtcttgtttgttgagaataatccatgtggcactccttctaagcgaataggcgcattaagaaaatagaaagggtaaccgtaatcgcaccacctagtcgaacagcaacttgtgcaaatggcataagaaccattcgatcgcccgctgctaaaatcgctaaggcaccggtcccaccttgtccgctacaacacgaaaccgcaattgccgtatctactggatacatgcctaaaagttttgcactgaagaaagctgccgttacgatccctgtgacagtcacaacaatcgtaattaacattgggacattcgtaaagaccgtaatcaatgaattccaaggcgtcattgcaaccccgaccccaaacaagagtggcggtgtaattccctttaccgttaaactatataatgaactcccaccagcttgtaaactttcaggaatccagcctaacattttagcagccatcacgacaattaataacacgattggtgcgggtaaatgaatcacgctattgacccacactcctaataggtaaagggcaactgctaaaatacctgatactaacattttttcgatatcagcgccgcttgttttttgtgttaagttatcaagtcctgattcagcttcatcagtatctactaaacgcccattccccgttaattcaggatgaacgtcaccgatttttttcaaaataccggctaagataacggcaaccaaactccctaacatgacgcaaggtagaatcatcgcaaaaatcttaggttgcgtcatcgaaataattgctgcgtaacccagtgataatggcagtgccccttcaccgacaccaccggccataatcggtgcaacaacgtaaaaataactcttccatgcagaaagacctaataacgttccgactgcgatgcccaaaagtggcccaactaattcacaaatcaataagacaacgataattctagtacttgccttgattaatgttttccggttcatcgcgctgatactaccgacgattaatagggcaataaagaaggctaagaaattatttcgtgtcataaaatctgtgacaacgtgcacggtacttttaggtaaccagttttgataaacgaggtatgagggtaagaatgtaacgactaataccttaccacccaatgatttcaagactggaatgtgtttcccaatttcttcaagaataaatgagaataatgtcatgatccctagcgcacctaacatatcgttaggcatctggttattcattgttaatagaatgtaaccaagcgctagtattaaatatagcggcattgggataatcccaatgtgtaatgcaataaatttctgaaataaattctgattgttgatagttttttttgcttccatcactaaaaaccccattctaaatcattatttatactgctttactgcttctacaaccgtattgacaacaccttggtcaaaaacccctgggacaattttctcattcgttggtgcttgaatcatattcgctaatgctttggcaatttcgccttccattgctgtttcaaaatgtgtaatgtgattttccaataaacctttgaataaccctgggaacgccaagatattattcacttggttaggataggccgaactcccagttgcaatcacagcagcacctgcttttttggccaattctggatcaatttcaggtactgggttggctaatgcgaagataattggatctgtcgccattgattgaaccatctcagccgttacaagctccccaacggataacccgattaacacatcttgatcgactaaagcttccgctaacgttgttgcatctgtttctggttgaaccgcttgaacaaattttaattgataatcgttcaaactggtttgttgatcacgaataacccctttttgatcaaccaatgtaatgtgttgaatcccaacgctcgctaacaatttagcggttgctaaacccgaagcaccagcacccgtcaaaaccactttcaaatccgttaacgatttaccaaccactttcgcagcgttgattaaacctgctaacacaacaattgcagttccttcttgatcatcatgatatactgggatatcaagcacttcattcaattgatcttcgatttcaaaacatctaggcgctttgatatcttccagatgaataccggcaaaacttttactcatatttttaaccgtttgaacgaattctggaacactcgtttgttctagcgcaagtggaatcgcatcgactccggctaactctttatacaaaagcgcctttccttcaacgactggtaggccaccttgtggaccgatatcgcctaaacccaatactgcggagccatcagtgataatggcaactagtttgccgctaatcgtatattgacgggcaagcgctggattttgttggattaacttacttaaccccgcaacccccggtgtatatgcttttcccaaatcagtacgattcgttacgggtaattcaccgtgaatacttaagacacctgtatgtttttcatgcaatgcttttatttcatcaagagccattttatcaacctcccattttgataaatttgaagtattttaaaatatttcaaaaaacacgattatttttaaaatattttaaattaataatacgtctaatgcttcactttgtaaatagaaagcgctatatttaatatataaaatttttttattcgtctttgcgaataaattcattcaaggagcagcccatggccgaacaaacaaataccaacctattaatcgatattgctcaagatttctatatcaaccaattaaccatcgctgatatttcgacgaaatatcaggtgagtcgttacatgatctcaaagtatctcgatgaggcactcgcccagaatatcgtttcaattagtatccgctccccttttgcacggaaccaagaacttgaacgccaattggccgccgtcaatcctggccaccacttctatgtcctagcgaacgctgaacaaagcaataatgatgcggatcgtttttactcatttgcggcacaaacggttcaaaatctgattaatcctttaaaaattattggtctcagttggggagacaccgtctataacgttatcgagcactttaaaccaacggtcaaggaacagttaattttcactcaatttatgggcgaaaatggcaaatataattcactggcgggctcaatgcgcatggtgcaaaaggccgccaataaatacaatagccactattcaaccctcaatgcgccactttacatcatcaatgatcaggttcgccaactcttaagtttagaaccagcgattcaacccaccctcaccaccgcgcatcagatggatttaattctcactaccttaggaacaattgaatcattagaatctattcctagttggcaagagagtctagttgcattgttccctaatctcaatcgcaaggaagtcgctggctttttatatggtcgaccattcaatcatgctggtcaattcttaatcaatcccattgccgacaaaacatttggcttagccatcgattccattttacaagtgccgattcgggtagccgtcgtgaacaataaatttaaaagtcatgccgttgcagctgcacttcgcggtaacttcctcaccgatcttgttttagatgaaccaactgctaccaaaatcctagccattcacaattaacgcaaaaaaaccgccaagacaaactgtcttggcggttttttaggccttgataaaggctaatacgatttgattaaagagggctgattgttctgccatcacaatgtgtccggcttcttcaatcacctgtgcatgcccatcagcacccatttgtgccacgattggtgcaaaggctggattgaaaaacgggctcttttcacccgcaatcactaaatacgggcgcatactctggcgaatcacatcccgccaatcttgaaatgcatgatcgaccaacaacggtaaatcaagctgccgatcaaacggtgattgttgcttgacttgtgccaccacatcagccgtatccgcatcgattgcccggtaagtcgccttaccaaaatccaaacgcaattgcagcggaaaactatcccaagtcaaatccttaaaaccaaacgaccatgtttcatccgcaatcatcttgggtgactgatcaacaatcacgactttgtctaagtcacgatcaccgtacagcgacatgtatgcccaaatacaagcagcgcccattgaattccccactaaaattggcttggccaatccaagcttggtgattacttcagcaagatccagcgccattctagacattcgcaagcccttgacagtatgttgtgccattccttgattacgaacgtctagttgaatcactcgataatgatgagcttcaaaaaaggctgcttgcgcatgccaaatttccttggccgccccgaatccagcgataaaaagcattggctgcccttcaccaatatcagtataatccagtgtaatttgatctgaagttacaaatttcatttaattgcctggctaacgtcagtatctacgtcactttgtggcccatcaccgacaataatgtccttgaataagccataaacaaagcggtttggatcaaagagttgtaagtcgttcatttgttcacctagaccaaccatcttcactggtaagtgtaattctgtgcgaacggctaaaacaatcccacccttggccgaaccatctagcttggttaagacaatcccagtcacatcggttgtttgcttgaattgtttagcttggactaaagcattttgtccggttgttgcatctaagaccaacaatacttcttgcggtgcagctggtacttcacgcgtgatgatgcgtttcactttttccaattccttcatcaagttgacgttgttttgcaaacgaccggccgtatcaactaataaaatatcaaattgttcttctttagcgcgcttaaccgcgtcatagacaactgacgctggatcactccccgctgcactagcaaccacggggacattatcccggcgaccccattcttgtaattgttcgatggcgcccgctctaaaggtatcaccagccgctaataagaccttcttacccgctttttctaattggtgggcaaacttcccgattgaggttgttttccccgcgccgttgacgccaacgaataagaagacagttaattctccttgtggggcaaaatgcaattgattatcttctgcttggccttcttgaccatacaaatcaactagcttttcgacaattgcttgagaaaccgcctctggtttcttaacattgcgtaacttcacttcgtcgcgtaattcgtcagcaatcttcatcgctgtttcataaccgacatcggcctcgattaacatttcttcgacatcatcgaaaaaggcttcatcaacacttctaaagttggcgaacaacgcatttaaccgttgcccgaaggtgagacgggatttttctagcccatcatcatatttctttgtttcagcagcttgcatgtcgccagttgatgtttcttctgcttccggcacttcttcaatcgcgtcggattcttcagttgctgaaacttcctcaactggttctggttctggttctggttctggttctggcgttgagtctacaggtgcttcctctggtgtgtcaaccgctggcgtcgtttctgaatcgtcttcagttgctaaactggctggttcatcggtttcagttttctcagctgccgcagtttctgcaggggtttgcgattcaaccggcgtggcgtctgattcaaccggtgtttccggtatcgcttggtcttgttcaaccggtgtttctttttctggttcggctgagaatgcttttttaatacgatcaaataatcccatggttttcctcctaggctgttgcgtgttcttctaatgaaacggaaacaatcttcgagattccagattccgccattgtcaccccgtataagcgattggcttgggtcatcgtcccttttctgtgggtaatcacgatgaattgtgtatcactctcataacgtttcatgaaacgaccgaaacgatcaacgttggcttcgtccaacgaagcttcgacttcgtccaaaatacaaaacggcactgggcgtacttttaagatggcaaacaataacgtaatcgccgtcaatgcgcgttcaccaccagataaaagactcaagcgttgtagtttcttaccaggtggttgcgcaataatgtcaatcccactcgttaatagtgcgcttggatccgtaaacgttaagctggcatggccgccaccaaacatgatcgggaagatggtttcaaaagcagcggcagtttgttcaaacgtttccttaaaccgcttttcaacttccgtatccatttcagccatcgatgctaataattggcgcttagcgtccatcaagtcggcatcttgttgcatcaagaaatcgtaacgttctttaacgcgttgataatcatcaatggccgccaagttgaccgttcctaaatcagctaagccgagtttcaataatttcaacttagaccgcaattgatcgtcggttaagtctgatgcggccaaagcggccttggcggcttcgtaagtcaattggtaatcttcgctcaatgtatttaagcgttgatcaatgttaattttaacccggttgagcccgacagcattttgttcttgctcagctaaactatttttttgtaattggtagacgcgtgtggcattggcttgaagcgtttgttgttccgccttcagcgtttctttttgcgcgcgttcagtggctaatttcgcttggactttctcaatcaaagcattggttgcctttagcagtgctcgtcgttctttttgactcgaagcgtcttcttgatccgcttgttttagcgcagctagtttatcctgactggccttcaactgggctgccaggtcgttgctattgcgagtagcaaccgttaatttctcctgaacattcttttgttcagcttgagcgacagccaacttggtttcgagggctgtttgttgttgcgcaatttgtttttgactctcatcaaaatgttgtaattgctcattagctgtttcgagatctgcttgcagctgtgcaatcgacgcaacaatttcagcttcggctgccactaattctgcctggcgttttaaatctgcctcataagcttgttgttgttgttgcacttgataatcggttgcttgttgttgccgttcaaactgactcaaacgttcgtcagtcaaggctaacgtattttgggcagcttgatattgattcttagcggtttccaatgccgcttgtttcgtatttaattctgcttggcgtgccgttaattgagcttttgcggcttggacactggcttgcttttgatccaaagcgacctgcatcttggcaatttgaccttctaaatcagtcaaggtttgcttacgcgcaagtagcccaccattgttttgtcggttattatggcccccagtcatcgaaccacccgggcttaaaatatcccctgctaacgtaatgattcggtaacgatgccccgtcaattgactcaatttaatcgccggctccaactcagtcgcgacaatcaaattgcccatcaaatggttcatcaccggtcgcacttgttcatcaaactgcacaagctcactggcaattccgataaatccaggctgctgttgtaattggtgaactaagctacttggtagtaaacgtggtttgacaacgttattgggtaagaaagttgcccgcccaatccgattggttttcaaatactcaatcgcttgtttggccgtctgttcatcccgtgtcacaacttgttgtagctgtgcgcctaatgctaattcaatcgcttgttgatactcactgggcacttgcatcaattccgctacagcccctaataaaccagggaactgttgtttttgcttcaagacagccttaaccccttgataaaagccggcgtagtcatcatttaattccgcaagactagcttgttttgctttcgctttttgtaaaataccagacgcttggaaccaactattttgttgattttggtaagccgcttggtccgtgttaatttgcgtttgtaattcggccaactcattggacaacgtttcgtattgcgctttgagtgtttcaagttgggctttttgggccgcttgttctgcctttttttgtgccaattgcgtcgatgtctcatcgactgcactatcttgccgtgcaagttgcgttttagtttgtaacaagttcttttctaaatattgttgttcattatgattggtcgtttgggcttgcatctgatcgatgtattcttgacgaatttgttcaatcttcgctttcagttccgcttcactaccagacgcttggcgtttaagggtggttaactccgtcttcaacgccctcaatgccgtcactttttcttcataacttgcctttaattcagattgattggcttgttccgccgttaattgctgttttaatgtgtcgatctgttcgactaaactttggcggttcgcatccgtataattagcgcgctcttttgaaacgttctcttggcctaatagattttcagccaagcgagacttttctaacaacgtctgattatcttgttctatttgttgttccaactgggctaaggttgcctgattctcggtttgggcagccgtcgtcttagcgatgtccgcttcaatctcttgcaacgcttgcgcaagggtttgcgccttttctttgtacgtcttttgatcagccactaattgatcaatttcaatcaccaataattgttggtgcaatgcatcatattgcgctttttgatccaagtaatcctgcgcaatactgctttgttccttcaacggttcaacttgtccccgtagttcatgaagaatgtcggtgacccgactcaaattttcatctgtttgatctaattcagattgagcctttttcttttgttgtttatatttcaaaacaccggccgcttcttcaataatattccgccgatcttctggtttactgttgaaaattgcttcaacccgaccttgcgaaataatcgaaaaagattctcgcccaaggccagaatccataaataaattaacgatgtcttttaaccgacaactcttttgattcaaataaaactcactatcgccatttctaaataaacgccgcgtaatcgtgacgttggcttgttcttgtttcaaatattgatcgctgttatcaaaagccagcgtcacttctgccttattcatctgtggtcgaatatcagtcccggcaaaaatgatgtcgggcatcttttcgccccgtaagctcttggctgattgttcgcccatcgcccaccgaattgcttctgtgacgttacttttaccgctcccgtttggtccaacgatgcccgttaaaccttctgaaaaattgatttctgttttatcagcaaatgatttaaaccctgataaaaccaatgactttaactgcatgcactaaactccctacacacggcggttggtttcaactgtcgtttgcttctttctttatttcagtttggaaagcgccactttagcagctgcttgttcggctgcttttttgttccggccaacacctgaacctaagacgcgatcgcccatcatcacatccacttcaaattgacgggcatgtgatggtcccacttctgccaataacttatattcaatctcaacttcaccatcttgttgcaagaactcttgcagattggtcttataatccgtttggtccgaaaattcaccggcttcaatcttgggaaagacaacttgttcgatgaatttaacaactgcgccacgcccttgatctaagaacaaagcgccgttaaaagcttcaaataaatcttccaaaagtgttgctcgtgcccgcgcaccgtttttttcttcccctttaccaaggcgaatgtatcgatcaaagtgcgcttctttggcaaaactactgaaactcttcgtgcagacgattgccgcccgtaagcgtgtcagtttaccttctggccagtccggatattttttatataagtattccgaaaccgtaatttccatcaccgcgtcacccaagaattcgagccgttcgttatcacgaagacccaactcccggtgttcattgacgtatgacgaatgtgtaaaggcttcgtccaatagtgctaaattctgaaattcaatgccgtagcgggctcgaagctcgctcactagtgctgcatccaaaattaaattaccccatttcaactgtttaatctttcactattataccgtttatacgcttaaaaaaacagcgtcgttcctagcaaaccgtttcttttattaatcaggcaaattacaagtttaatccgaacaagcccggaatctttcaatggcagtctgttgatgatgtatttttaatggtcgttgattaattagttcaagtgctgctaggatctcatcagtcgttacttggctaaaattggtctttttcgggaagaaccagcgtaaccgcctattaaaatattcattggaacctcgctcccatggtgaatatggatggcaaaaataaactttgatctgataatcctgttctaaggcctgataattggcaaactctttaccatgatcaacagtaatggattttacttggggaccgaaggcccccataaacttgccaaaggcggtgtttagagccttagccgttctattaggggctttgatggcccatagaagtcgggtcttacgttctacgaatgtaaccagacatgatcgtgactcacttcgactagaaagcaccgtatctacttcccaatgaccaaaagctaaccgttgattaacagttgttggccgttgttcgatggaagtcccacttgtaaatttcccacgattttcgctcactcggtgctggcggacattccgattgggtagatcagtcaatttgaaggggagccagccacgattaagccaattataaattgacgcagtgctcaagttataagcggccgcaatggtttctggtgaccaggttaatcgtaagtgattggtaattaaagtcgctaatgctgccgtcagcatcgaacgacgaccgcaattccgccttttgcgatctgcatcttgctgagctaattctggatcataaggtttaactcggtccaactcatagctaatcgtagctttggcgacgcctaaggcgtcagccattacttggtaagatttattcccctcattgaccagttgtgctagtgcgccacgttgaaaacgtgataaagtagatgtacccaaagtaatcactccctatattggttggaattagctactaccattgtaagtgattgctttgggctttttaatttctgttcggattaattatagaatttgccatcactaaaaaacgcctgttttgaagtattcattgtaacacgcaaacgaatatttcaaaacaggcgttgctttatgcagatggcgttgacattgctgctaaagcggtttgataactcgctagttcagcttcagttgcatagacatagtgttcatcggccacttcgcgcaattgacgaccttcattatctgcctcaattgaactatcataagcaattcgccgacgttgccgttcgacctttggatcaggtaacggcacagcagacaatagactttgcgtatatggatgcaatgatcgatcataaatatcatcggctgatgccaattccataattttaccgttatgcatcaccgcaatccgatcactaatgtatttcaccatcgataaatcatgtgcgatgaataaatacgttaagttttgctgttcttgaatttctttcatcaagttaaccacttgtgcttgaatcgatacgtcaagcgccgaaatcggttcatccgcaatgataaatttaggttttacggcaagcgcgcgggcaatcccaatgcgttggcgttgcccaccggagaattcataaggataacgcgttgcatggtctttattcaaaccaactaattccaaaagttcattgacgcgtgcatcacattctgcatcatttttaaccaaatgatggatatgcaagccctcagcgatgatgtctttgactttcatccgtggattcaatgacgcgtagggatcttggaaaatcatctgaatctctttccggaacgccttcatttcacgactatgatttttaatcttactaatgtcacggccatcgaatagaatttcaccatctgtcgggttgtatagccggatgatactccgcccagttgtactcttcccagaaccagattcacccaccaagccaaacgtttcgccttcatagatttcaaatgagacatcatcaatggccttgacttcggatttttttccttggctaaaatattgctttaaatgtttaaccgacactaatacttttttatccttgtccatcaattgcccctactttctcttgaacttgtgtcgcctggtacttagccatcattgcacggacggctgctggtggctccacagctggtgcatctggatgtaacaaccaagttgccgcaaaatgcgttttcgacacttggaaaaatggcggttcctgttccacatcaatttgtaaagcatatggattacgcggtgcgaaggcatccccttttggtggatccaacaagtctggtggggtccctggaatggcttcaagacggccagaagtatcaagtgttggcattgagttcaataagccccacgtatatggatgcttgggttgataaaaaatttcatcaaccaacccatattcgataatcttaccggcatacattaccgctacgcgatcggcaatccctgccacaacacctaaatcatgcgtaatgaaaataattgaggtttcaatcttgcgttgcaattccttcatcaaatcgataatttgtgcttgcactgtcacatcaagcgcggttgtcggttcgtcggcaatcaggatttgtggataatcaacaatcgcaatcgcaatcacgattcgttgccgttgcccaccagaaaattgatgcggataatctttcatccgtgcttcggcattcggaatacccaccaactctaaaacactctgtgcacgtttcattgcttcttccttattcattgttttatgaatcaacaagggttcagcaacttgtttaccaatcggcatcgttggatccaatgacgtcatcggatcttggaaaatcatggaaatatcgctaccacgtaaggcattcatttcctgttctggtttttgtaagagatcttcattgtgatacttgattgtaccacccttaatttgagcattacccgctaacaagcccataatactacggaccgttaccgacttacctgaacctgattcaccaacaatcgctagtgtttcgcctttttttaagttgaaactgacatcgcgaatagcatggacgtcccctgcgtaggttttaaaatcgatacttaaatgtttaacttctaaaatatttgccatttgacgacctccaatgatgaaaccgcgtggaaacggccttgtattgacatgctttttgaaactgactctgcttctaaacgtgctttcattaactgctttctgtggttagctacgtctaacaaataatcaacaagttgattattcgccagactatgctaatccgcgaaagctaaccgcctacttgcacacgctatgattttggatcgaacgcgtctcttagtccgtctgctagtaagttgacggcaatcatgatcacacagaggactgctgctggataccacatttgatatggcaagaaacggaaagctttttgcccatctgataataacgtccctaatgaagcattcggtgctggaatcccaatcccgataaagctcaagaatgcttcgaagaaaatcgcactcggaattgtaaacatcgtttgaataataatcgttgaggataaattcggaatcagatgtttccaagcaatcttggtggaactttcacccaacgtccgtgcggcgagcacgaattcttgttccttaagttggaacgtttgggcccgaatcaaccgtgccattgtaatccagccggtaaaaccaatcgcgatgacgattgacaataaacctggacggagtaccaacatcatcaagacaaccacaattaagtttggaattgatgaaatgatttcagttacccgctgcatgaacatatccaaacggccaccacgccatccggaaacaatcccgtatggaatcccgattaataaatcgaccaatgtcgctagaatcccaattaataaggataagcgtgtcccgtataaaattcgtgataataaatcacgaccgagataatccgtccctaagataaacgttttgcctttgggaacgcccgcttgttgatatttatcaactttaacaccggaaacgtccatcttaccggtaaaaccagggatattccccgatccaattttaggcggtaagttagcgtacgccacattttgtgtatttggactttgtggtgcaatcactggtgccaataaagcagccaacatcacaattaagaggacaactaatgaaaccaccgcgactttattttgctttaagcgccgaatggcatcttgcgtaaacgtcaatgatggtgcactaattttttcttgtgcttcatgcgtgtcttgtgtaaggggcttgaatgagcccgctggtattttaatatctgccatttagtgcgccccctgactgtcacttaatcgaattcgtggatcaataatcccgtaaagaatatcgacgactagaataatcactgttaataagaatgaatagaaaatggtcaagcccatgatcgttggataatcattcgtcataattgacttcacaaattgctccccaattccgggaatcgagaaaatattttcaacaactagtgacccagtcatcaagttgactgccatcggcccgataatcgtaacaaccggaatcattgaatttcgtaaggcatgctttgccactgtttgccattttgaattgcctttggctttagcaagttcgatgtaatcactgtttaaaacatcgaccatttcagtccgcatgaaccgagccgtattcgccaatggtgcaaccgctagtgctaatgttggtaagacactagatgaccagccgtcccataacgcaattgggaatagttgtaatttaaaggcaaggaaaaattggagtaagaccgccaacacaaagttcggaattgaaatcccaacgattgaaaagaacgttgcaacgccatcgacccatgtattcttgcgaatggccgccactgcccctagtaaaatacccagtaatgagccgacaatcatcgcttgtgccccgatttgtaatgaaggtcctaaacgcgtcatgattaagctcaagacgggctgattgttgaactggaaggatgtgccaaaatcaccatgcaacaagccacctagatagatgaaatattgctgaattaatggtttgttcaaaccgtactgttcattcatgatccgtaattgatcagcactcattttttcctgattcgtatatggcgtccctggcatcaacttcatcatgaagaaggtcacagaagcgacaatgaatagggttagcactaaatagaatattcgtttaacaaggtatttactcataagttcgctcctaacaaaaacgggcttcattgtttttcaacgctgaaacccatctttataaagtcagtttatttttttaaataaagtgagacattattgtagcttcctgaagggccgtagtctaaacctttaaggcttgggttagttaagtacgccacacctgattgatacagtggaatgacacctgactctgtattcataatatcttgtgctttaacaaggttttgccatcttgctttaggatcattggcgttgtcacctttacttgccttgatctgtgcatcgtattcggcattgctccaatggcccccattgttatcgccgcctgttacaaacaagtctaagaatgtgattggatctgggaaatcagcgttccaagcactaaccaccatgtcgaaatcaccgttcgttgaacgtgttaaacgagtcttaaatggcacgttcgctaatgtgactttcaaacctggtaagttcttttgtaaagtattttgcaaatattcggattgtttcttggcagtatccgtatcatcgccaagtaatgtgtaattgaatgttttacctgtttgcccagtttcagcaaggccttcgttccaaagttttgttgcttctttagggttgtaacttgcatttttcttacccgctgcgtctaaatcatcaacaaaatccttcttagttgttgggtcaaatgacatattctttggtgtcacagaagcaattggacttgaaccatcacctagaacctgtgcgactaattctttacgattaattgtcattgaaattgctcggcgaatcttcgcatttttaaagattggattcttttcttggttgacttgcatgtagaatgttgctgatttttgtaaggttgagtaatgtggatcgtttttcatttgtttagctgtgtcaccactgatcgccgtccgatctaatttattactttggaagaggtttaaagctgttgatggatctttaaccacttgatacttcaacgtcttaaccttaactgctttcgcattccagtaattggtgtttttaacttctttccatgagctatctgggccattccaattttctaatttataagggccgttgaaaactaatgttttagaatttgtcccgtaactcttgccagctttcttgaccgcttctggatattgggggaagaatgttgaactggtcatcaattgactgaagtatggaattggtttttcaagggtgacttctaaggtgtgtttatccttagcgactacacccaatgaattaaccggttccttaccagtcgtgatgtctgctgcatttttaatgccttcatagatataagcatattgtgaaccgacctttggatcaacgactctgcgccaagcataaacgaaatcttctgccgtgaccggttgaccattgctccacttcgcgtcttttcttaatgggaatgtatatgttaaaccgttattagttggtttgaccactttagtcgcaatcgccggtttgatttctttaccctcgtagcggtaaaggccttccatcgtatcggttaaagcctgcgcaccgatcacatccgtatttaacgctgaatccattgtcgcaatgacatccccagttgcaaaactggctgtgtcagtcttaacggcttccttgctacctgagttaccacaagctgctaataataatgtgaccgccactgttgttatacctaataccaaactcttttctcgtttcatatggacactcccttcagttattaaaaataataatacatgattaaaaatgaaaagtaaataataaagattaaaatattctaatttattttcattgattcagagccattataagaatcattctaatattataacgcatccgcaaatgattattatgtgaataatctcattttcacaaactgtttaaaatgcaaaaaaataagcctgtcggtcgcgaatactcacaaccaacaggctcgttttcaaggttattatttgatttttgttttaatgtaagcaacggcatcagctaccgtaccgatcttttcagcttcttcatccggaatttcggcaccaaaagtgtcttctaattccaaaacaaattccacaatatcaattgaatcagcatccaagtcttccttgaagttcaattcgtctgttacctgatccttatttaactcaaatcgatcgccaataatagccgcaatcttatcaaagatttcttgttcattcataattaaaaacctccaaattgaaacccttacctacgtacttaacactttgggtatccagtgattatacataacttcgcaactcaattcaagtaaatcaaatcagacttgcgaagtatattgtagcgcctttggaacacattgtccacctattttaatcggtttcttttgggctattttgttggtcaaaataatcgattactttttgaatcgtttggttcgccagcattgcatgaatctggcgaacagtgtagtaaaccgtgcggccatctgcagcaccgtgcgccttaacaacaggggcttttaagcctaataaaacagccccgccataaacagatgtgtcgaatttatcacgaatcccaccaacactctttttcaagagtaaaccaccgattttttctttgacaccagcatccataatcgcatgtttgacttgcgacatcacgattgtggcagtcccttcaattgctttaagcgtcgcattgccggtaaacccatctgtgaccacgacatccgcaaccccttttaagagttcacttgcttcaacgttaccaatgaagtttaacgttagatcatctgccagtagttgatgtgctgccttatgcaactcatcacccttgccagcttcagtcccattattcaacaaaccaattcgcggcttttgaatgccacggacgtcttgtgcgtagaagttccccattaagccatattgatgcaaatgctccggctttgcttcggcgttggccccaacatctaacatattgaagcctaaatctgaattaatggctggtagggtaggcattaaacctggacgatcaatccctttaatccgaccaatcacgaataatccggctgctaagagcgcaccagtattccctagtgaaaagagtgcgtctgcttccccatctttaactgcctgcgccgccagaaccattgaagcttgctttttacgccgaatcgcacgcactggttcatcttcgctggtgattttttcggtggtatgcacaatcgttaaccgcgtcatatcatcaatcaacggtttaatttgcgcttcatcaccatacaacgtaaattcaacatctgttaattctgagcgggcttgtaacacaccttcaattactgattggggtgcaaaatcgccgcccattgcgtctactgcaattttcatcatcattcctctttccgttttcaatctaacgttaggtaattttgcttttgttgttgtaagtatgttttgagtggcgtatggtccggtgctgccaactcaggatcaagcgtgaagattttttgcacttcttgttgggcgacttgtaaactcgcaaagtcggctactggatcgccaactttaaagacgggcaatccagattgacgatcaccaaagacttcccctggcccgcgcaattctaaatccttctgcgcaacgacgaatccatcagtggtttcagtcataatcgtcatccggtcaacaccttgttggttcttcggatcagccaccagaatacagtatgcctttttcttacctcggccaacccggccccgtaattgatgtaattgcgccaacccgaaccgatccgcatcaaaaatgagcattaccgtcgcgtttggcacatcgacaccaacttcaacgacggttgttgaaaccagtaattgaattttgttctcagaaaaagcgttcataatctgatttttttcatcatcttttaactggccatgcaacaatgcaacatggtaatcaggttcaaattgttccaccaacgttgcgtaaatctcctcggcattctttaaatccatctgttcagattcggcaatcaacggtgtaatcgcaaagacttgcgaatcgtttgcaagttgtttacggacaaagctgagggcttgttcgacttgattactacgcacccaactggtttcaattggaatccgtccttttggcaattcatcaatcgttgaaacgtccatctcgccatacgcggtaatcgccagcgtccgcggaatcggggtcgccgtcattgcaagaatatcaggctgtaaccccttttcacgcaaaattcgccgttggttgaccccgaaacgatgttgttcatcaattacagcaaagcctaacttatgatagaccactgcatcttgaatcaaggcatgggtgccaataataatattgatgcgcccggattcaatgtctgccaacaacgtccgccgttctttagccgtcgtcgaaccggtcaataagccaacagtcacgttcattggtgccaataagcgttgcaagctttgatagtgttgttccgccagaatttccgttggcaccatcaatgcggcttgataacccgcagtcactgccgcgaacagcgcaatcgccgccacaatcgttttcccagaaccaacatccccttggagaaggcgattcatatgcgctggtgattttaaatcaagacaaatttcattcaccactcgcttttgtgcatcggttaaatcaaacggtaaggtttgaataaaatctttaagtgcttcattttggtactgcaaagctaaaccgtttgccacatgccgatcagtctgtttaatggcttgtaattgaatctgatataggaagaactcatgaaaaatagcgcttcggcgtgcttgctttgcttcaggatacgttttagggaaatgcatgccagcaattaagtcgcgttcgttcattaacttatagcgcgtgcgaatatcctctgggatcaattcgggaataacgtcttgatacaaatcaaaggcttcttgaatcatcttgaccagtgtcccttgacgcacacttttattaacggaatagatggccgcaaacgatggattctcagccgattgaaccgctaggaccttcatccccgtcaatgtatgacgtttagcatcccacttgccataaatagcgacatcgaccccggcttcaaacttgtccttaagatagggttgattaaaaaaagtaaccatcacaacgtcatgttcaatcaagagccgtacattcagccgggtcttccctggtccccaacgactgatgaccggatcagcgacgaccgttccttttaacgtcaccttttcctgatctgccgcttcggataaatccttgaccttcaaatcttcgtaacgaaacggaaaataatacaataaatcactaatggtccttatgccaagctgatcgagggctgtcagacgtttcgggccgacgccagctaacacagcaacagaatccgttaaacttaacattgacagcctcctgtaacgtgctttcaaaagcatcctgttgcgtttagcaccattagccaaacaagtagctacgctagtcattcggctaattaaactaatcctcacaggataagcacttttgatacacttctttttcttaacgtgctttttaaccatattccaaggttaaacgtacttctactaaaaaacgggaaccaggtatattcaacctcattcccgttttatttgattaactattcaactgaaatcaagtatgggtaaactggttgattcccttcgtgtacttcaacttctaattctgggtcttgggccataattgcatcactgatttgttcagcttctgttgcatcgccgtcttccccgataataattgtgacgatttcactgtcttcatcaagcattgtttggaccatttcaatggctgctgttaaacgttcagccgttgagaccttaatcttaccatcgataatccccatgtaatcgtctttcttaatttcaagtccatctaaagtcgtgtcccggattgattgcgttacttgaccactaatcacggtatctaacgcctctgtcatggcttcttgattagcagccaattcagcagatgggtcaaatgataagagagcggtcatcccttgagcaatcgtccgactttgcacgattgcaactggaatatcagccacttcggcagcttgttcagcggctaagaagatgttcttattatttggtaataagatcacttgtttagcattggctgctttaatcgcatctaaaatatcttgcgtacttggattcatggtttgaccaccacttaagatataagtagcccctaaactcttgaagagttcagcaatcccatcaccggccgcaatcgcgataatcccattttcaacaggttctgcttgcacaggggcagcagcttgttggtcgttttcaacaatcgtatcatgttgtaaacgcatgttatcgactttaatcttcactaatgaaccaaagtgttggccgtaagccatgactgtccctggatgttctgtatgcacatggaccttcaccacttcttcatcggctaccactaagagagagtcaccaacaccgtttaaatgattgcggaattcatcataatcaaattcgcgatcgacagttgtcccatcaccaagggcgaccatgatttcagtacaataaccattttcaatatcttctgtacccatttgagcggtttgatgatgattggcattgaccatttcatccatttccgcttcatcaggtgtgtaaagatcttttgcaggtgcttggcctgttaaaccttctaagaaaccttcatagatgaagaccaatccttgaccaccagaatcaacaacgccgacttcttttaagacagggagtaattcaggggtcttcaacaaggccttcttagaaccctcaacaacagcttcgataactgcaccgatatcatcagtttgaccggcaaccttggcaccagctttggcgccttctctggcaaccgtcaaaatcgtgccttcaacgggtttcattactgctttataagccgtttgaacaccatttgtgaatgcgtcagccaaatcttgtgcatccaatgtttctttttcagccatgctcttagaaaaaccacggaaaatttgtgaactgataaccccggagttaccccgagcgcccatcaaaagccccttggctaaactcttagataattcaccgacagattgcgcgttgttttcattaactgctttggccccactttgaaacgttaaactcatattggtcccagtatccccatcaggcactggaaagacgtttaatgaattgacaaattctgcatttttagtaagccgatgtgcagcaacccgcatcattgcttggaattctgctgctgtgatttcagtaactttcacgaatgttcctccttgaacaaaaacaaatagaactggacctagtggccagctccgctaattagttttagtcttctaatacccgtacaccttgaacataaatattcactgagttcgcactgacacccaacattgtttcaagattgtacttcactttactctggacgttacggcaaacttcagagatcttaatgccgtaaccaacaataatatagacatcaatcgcaacgccattgtcttcttgacggactacgataccccgattataattctcacgattcaaaatatcgtttaaattgtcacggatttgattcttacttgccatcccaacaattccgtagatatctgttgcagcgccaccaacgacggttgcaatcacgttattggtaatatcaatgtcgccatattgtgttttaattttaacagccattaaaatagcctccttgtgccatacttattgttattttagcatagcggagaagagttgcaaagcaactggtgatgaattcttcccaaaatacggcttatttttggactttaatgagtttaaacgacttattttggactgtcaagtaaatttccttgaaagagctcttgcattccccaaactattatggtaaattatttaagtgaattgtataagccggtgtgcatgcatgcaactattaagactaactgaatcatattatgtttctcgttaattctaccggctttacttaaaggaggaataagaccatggcaaaagacgttattaccggccgtaaaacatcatttggcaacaagcgttcacacgctttgaacgcatctcgtcgttcttggaagccaaatttacaaaaagtacgtatcttagttgatggcaaacctaaacgtgtttgggtttcagcccgtgctttgaaatcaggcaaagtaactcgtgtataatttcaattgatagatcgccagttggcggtctatttttttggcaaaaagtgcgagataagtcggctaatcctcaggcgatgactgatcgaacacgtttatggcaaccaaaaagacggctcggataaaataattttatccgagccgtctttttaatccttactttgaatcaccgcaaccaccccagtttcaaaactaaattggccggtctcaccgatgaactcattactagcccatgaaatcgggacttgtgtttggtaatccaccaagcaatatttttcatcaattaaatttaaaccagttgtgggaactaatggcacaaaggccagataccgtttatcggcttctttttgtaattgatacgtccctggtgcataaaagcgaatcgtattttgccgatcgcgcatctctaagcggtctaaaaacggcttaaaccgtgtttctaagggcataaagagattagcaagaaaatggtccaaccgaccgcctgttgcgccataaagcacaacttgatccgcattaaattcagttagcgcaattgataatgccaactgagtgtcggtatcatctttttctgcttgcacagagcgaatatcctttactactgattgaacggtggtccgctcagccgccgtcaatgaatcaaaatcgccgactgacacgacaggtgttacgcctttttgcaataagcgccacgtaccacggtctgctgtcacccattgaccatcaatcatttctggctgcgccaattcgggggcccactcactgactggtcctcccaccaacacattaatccgcgtcatgagcagcctgctttaaagttgcaatccgagttgctaaatcaccggcaaacgtatatgaaccggcaacgaaaacatctgcgcctgctttggcacacgcaccgatggtttggtcgttaaccccaccatcgacttcaatcgtataatctgcatcagcatgttgatcgcgataagtcgctaattcagtgaccttatccaacatcgctggaataaacttctgcccaccaaaaccgggattaaccgtcattactaagacttgatcaaccaatgataagactggttcaatcgcactaactggtgtccctggattaatcaccacacctgctttaacaccagcatctttaatcatctgaagaccacggtagagatgttgcgttgcttcggcatgaatcatgattaagtctgaaccagctgctgcaaattgttcgatgtagcgttctggttgttccaccattaaatggacatctaagcctaacgttgtcaatggccgcaagccagttactacttgggggccaaacgacatgttggggacaaacatcccatccatgatatccacatgtaatagatcagcgcccgccttttcaaggttttggacgtctctttgtaagttcataaagtctgcgcttaaaattgaaggtgcgatttgtttcatcatcaaaactccgatcacatttttattttgacttcttgtaaactggccgaatatcctttaattctgctctaaactgtaaataattcgtataacgactttgcataatttcgccactgtcgacagcttctttcacggcacatttcggttccatcacgtgttgacacgttctaaacttgcatccttgcccgatttctctgaactctgggaatcggtcaaccaaggtttcaatcgtgacgtttaataaaccaagtgatgaaaagccaggcgtatcaccaactaacccatcattcaacggaatcagttcaatatgccgggttgtatgtttcccacgatttaaactctgcgaaatttcggcagttgcaatattcaagctcgggtcaatgtggtttaacaacgttgacttaccggcccccgtttgtcctgtaaagacggttgttttatgcgggaacgtgtcttcaattgccgtaattatctccggtgtaaaggcggtccgcggtgcaaaaatttgatagccgatcttcgcgtaatacgccaagtaatcactaatttcttggtattgttgatcactaatcatatcggtcttggttaaataaactaacccttgcatgtgcagcgattcaatataaatcaagaaacgatccaacaaattcaaggagaatgctggttccaccgccgaaacaattacgacagcattatcaatattagcgactggtggtcgaatcatctcatttttacggtctaaaatctcaagaatatagccactttctgtttcactttcactctcgaattcgacaaaatcgccgacaagtggcgtaattttccgtttacggaaattaccacgcgcacgcgttcgataaattttgccttcactttgtacatcataaaacccactgagggcgcgaataatctgtcctgtctgcaataggtcacctcccaattagtttgtcacatggtcatcagatagaatctcttgaccatttcttaaaatccggaaacggccggcttggtccgctttaatcgtaaatggcaattcaacggttgtatccgcggtaatcgtcatttctttataaacactcattattgaatgcgtgctatcttctaaataaatcgtaatcttattcgtcgtagccgttgaagtactacttgaactagagctcgtactactactgtcacccgattcgctcgagctgcttgtactactttgtgaagttgctaaggaattatcaaacggaatcgtaatcgacttcgtaaaactcttggtagcgggcgcttttttacctttagaaagtaccacgttaatattggcaccttcttgaatagatgcaccactaccaggtgattggctaatgactaacccttcatcaatcgtattggagtaatcctctgaaaaagtaaccgtcaaaccaacgtcatcaacatagtcttgaacagcctgtttcgtgtaattactcaaattgcgtaaagtaatgcttggcttgccgctgctgacagtcaaggtaatcgtcgtcttacttgggacaactttttcacctgcggcaatgctttggtctaaaaccagtcccgaagcaacactgcgtgaactctgatatttgcgcacaaccgtcagtcccttttgtttcaataacgtgctgacatctgtgaacggtttgtccgtatagtcttcgatctcatactttttacgacccgtactgattgttagatcaaccgtactgcccgatttaacatgcattcctttaccaggcgtcgataaaatcacatgccctttgctgtacttattgctagtagttttttgaatcttaccaacttttaatttatctgcggttaatgctgcagtcgcgttttcttgcgtcatgtctgtcacatctggaacagtcacttcactgccttgcattgcgtacgcagcgaagaccccgagcatcactaacaagactacgccaagccccacaaaccaccatttccgcttcgacttcttatgcggctgtttctttttctgatcgtcttttacttcagtctcatctttgggtttggcttctggcgcatcgttttggcgcgtaatcccttctgggtcgagagccggaatcacctttgtttcacccacatcaccttgtgagggcacgaatttcggttcatgcgcccgactagctgataatgaggtactcaaatcagtggtcatttgcccaacatcactgtagcgttcgtccggatctttggcagttgcttttaacacaacgttttccaaagcttgtggaatccgcggatcataatctcgaacgggtggtacggcatcttgaaaatgtttaatcgcgatggaaaccgccgattcaccttcaaatggcaccatacccgttaacatttcatacagaataattccgagtgaatagatgtctgaacgtttcgttgccattgaaccccgtgcttgctctggtgataaataatgcactgatccgagtaatgtattggtctgggtcatcgcggtttcactgagcgcaatcgcaatcccaaaatcgctaatcttaacgttacctgcttcatcgaccaagatattctgtggtttcaaatcacgatgaataatatcgtgcgcgtgggcattttcgaccgctgataaaatctccgtcataatatcgacgacgcgttgataaggaatcgggaagtgttcaacgatatacttctttaaatctgttcccttcacatattccatcacgatgtattgcatgctgttttcttcaccaacatcatagatactgacgatattggggtggttcaattcagttgtggcaagtgcttcgcgtttaaagcgacgtaccgtgttcggatcgttccgtaaatcaagtcgcagcaccttgaccgccacttggcgatccaaaatcagatcttgggccagataaacgttggccatgccaccttctccaattggacggataatctgatagcggccattgaccgcgtagcctgtctccatcatcgcgcaccctcctcaccagtttgatgtaagattaacgccgtaatattatctaagccaccggcatcatttgcttgttgaattaatgccgcacatttttcttccagcgatgtcggtgtcatcagcgtggtcttaatttgttcatcatcgaccatattggttagcccatctgtacataataatagataatcatctggttcaaattcgtaaattgttacatcggcatcgacatcttgcgaaacgcctaatgtgcgcgtaatgatgtttttttgcggatgatgctttgccgcttcttcggttaactccccttgtttcaccaattcatttaccaaggaatggtcctctgttaattggcggagttcgttattccggaagcgatacactcggctgtcgccaatattggcaactaagtaattggcacctgaaatcaacactgcgacgagcgtggtgcccatcccaaacaaatcatcatactgattagccttcgctaaaatatgtttgttttctttttgtaattcgaaaattaaccatttaaccatggattcaatgtcggtatcatcagttcgttcgaactcgtacccaatatgggaaaccgccatttctgaagcaacatcgccgcctaaatgaccgcccatcccatcagcaacaatcgcaaactgcgcaccgcttttattggtataaaagccgacatagtcttgattattttggcgttgttggccgacatcggtttgaaaagcaactttcataagaattcacctcaattaataatttaagcccgtcgtgttaaacaagcgatgaaaaagccgtctgtttgataatcatcgggatagatttggacaaacggtgtcgcttgattggctggcaatggtttgtcgagtgctactggtacgatttcaaattctggatgattggccacaaaagccgcaacaacttgttgattttcttctgggacaatcgtacaggtactgtaagtcaattgaccacccacttttaaggttggtgcaacggcttctaaaatcgccaattgaatcttttgaaggttcaataagtctgctgcttggcgaccatacttaatttccggtttacgtcgcattaagcctaagccagaacatggtgcatcgactaaaattttatcaaatgtttcaggttcaaattgttcactgactttgcgtgcatcgagcgcccgcgcatcaatgacgtctgcaacatgcaaacgcttagcgttttgctcaatcaagcggactttatgttcatgaatgtctaaggcagtaatttgccccccttgactggcatccaaataagtcgccatatgtgtcgttttcccacctggggccgcacaagcatccaagacccgatcacttggttgtagttgcaaacttggtgccactaacattgagctttcgtcttgaatcgtatatgcgccttgttcgaacaattcaccgctggctaagtgaccgccgtgggcaactaatccagcggctacaattacactcggttcaatcgttaacccgtcagcctgtaagtctgctaaaacggcatcaactgaattaacacgggtattgactcgaatggacgcattagcgggttggttaatcgttgccaataagtgttccaattttgattgccctaattcttggtggaacttcgccactaaccactgcggcatactgtaagtcacacttagacgttcgattggatcggtaattgctgctaaatcgggcagcccggtccgttgttggtttcgtaaaatcgcggtgaccaatttagccgtgccagcatggcccatttgtttggcaatctcagttgcttcataaaaaatcgcatgttcaggaacgcgatccaaataaacctgttggaaaactgccgtccgtaaaacttggcggacccaagttgccagtttagctggtttttgaataaagggggctaggtaataatcgagtgtcatttcgtgttgaatcacaccatacacgagctgcgttaaaaaaccagcatcttggggattcaagtggttttgtttaatcacttggtcgagggccaagtttgaataactgttttgtttggcaaccgccgttaaaatttcaacagctaaatagcgtggtgtctttttaggcatcttgcactaccacttgttgtccgactgcgagttgtttgccaaccccgtttaagaaagattggaccggcattttagccttaccagctggttgaatctcggtaattttcaaaacactgccattgccggctgctaattcgaaatcctttttgttgatagcgacaatcacaccggctggttgatccgtcgttgtttcagcaacagttgcttgccataattttgtccgttgaccattaattggcaaccaagcgcctggttgtggccgtaacgcacgaatctggttgaccagttgcgttgctggttgctcgatatctaattgttcttgttccttagtaatattataagcaaacgtcacttgtgcttcatcttgtggtatccggggcgcggtttgatcgataatgcttggtaatgtcttcaataatagatctcgaccgacataacttaacttatcaaataaagtcccggtgtcgtctgaagcttcaattggaatgctggcttgttcaatcatatcaccggcatccatttttttagccatatgcatgatggtaatcccaatttctgaatcgccatttaacacagcgtattgaatgggcgcaccaccacgatattttggcaaaagtgaaccatgcacattgatggctgcaatcttagcggcttctaataacttcgttggcaagaattgaccatatgctgccgtcacaattaaatctggttgcaaggccatcacgtccgctaattcttgactaccactgagtttttcaggttgaaaaacaggcaggtttaagcgaacagccgcttctttaacgggtgtttgttgtaagacttgcttacgaccaactttccggtctggttgggtcacaacggctaggacttgataatcgtgtgccacaagagcttctaaaatcggtactgaaaattggggagtccccataaatacgatggatgtcattaatcaatcacgctcactttaagtaaattgtaggggttcattgtccaacccaatcttgaaaccatgacgggtatcaatttgggtcgtttcgagaatctcggcgagtttcgcctgaagttgtggttcctgtttatatttaatcacaatttgatagaaataacgattattaatccgcgcaatcgacttcggcgtcggacccagcacaatcgcttggtcggataagacgggccgtaattgacgggcaatgtggaaactcttcttggctgccaacgcttcttcaggatggctaatcgttaactgtaccgtaaaataatacggcggatagccgccccgatggcggactgccatctcatattgatagaagccttcataatcatgttgcttggcaaattggatggcgtaattttccggattaaaagattgcacgattaccgccccggttttatcggcacgaccagcacggccactgacttgcgtcaacaattggaacgtgcgctcacttgcccgaaaatcaggtaacccaagagcggtatcggcgttaatcacgccgacaagcgttacatcgggaaaatcaagccctttggcaatcatctgcgtgcctaataaaatatcggcatcgtggtcgccaaagcgtttgagtaatttagcgtgcgcaccttttttgcgggttgtatcaacgtccatgcgtagaatacgagcatttggaatcagctcttggagttctgcttcgactttttgtgttcccgttccaaaatagcgaatctggcgactctgacaatttggacaagtccgcggaattgcttcttcatgaccacagtaatggcacttcatcgagtgcgtatccatatgcaacgtgagtgagatatcacagttgggacactgcaagacaaagccacaatcgcgacacatgataaaggatgaaaaaccgcgccggttcaacaagaggacactttgttcgcctttttgcaaccgatccttcaacgcatctaatagtgcaggtgaaaagttgctgctggcttgttgcttcatcgcctcgcgcatatcaaccaactcaactgccggtaatggctgttgattaatccgttgcgtcaggcgcaagagttggtagacgcctttttgggcgcgggcacgcgattcaagcgacggtgttgcactcccgagaatcactgggcaatgatggtactgactccgccagatggcaacatcgcgggcatgatagcgcggactttcatcttgtttataggaagcttcatgttcttcatccatgataatcacaccgatattctccaatggtgcaaaaacggctgaccgcgccccaacgacaacgctggcttctttgcgttcaattcgccgccattcatcatacttttcaccttcggataagccactatgtaaaacggcaacttgatcaccaaagcgacccttcacgcgtttgaccatctgcggggtcaaagcaatttcagggactaacattaatgcagttttcccctgttgcaagaccgcatcaatcgtttgcaagtaaacttcggtcttaccgctgcccgtaatcccttcgactagaaaaacccgatcagattgggccttagtagccgccacaacggcttctaccgcatcagcctgttcatcagtcaacgccattttttgcgtcgtcgtgacggttttaggataaggatttcgataagcttcaactttaacttggcgtaaccaacctttgtcggcgcctgtcttgatattctcccgggtaaaagtcgtcttggtcaaaacatcctttaataagggattgggttgatcaattaaactttgtaaataactaatgagttgactctgcttttgcgctgacttacgtaagccggtccgcgcttcttctaactgttcaaacgataatgccggttcaatcgccgttaattgcttcacgcgggcgcgatcatcgacatggtagaccacttcgattttcccttggcgttgtaactgcatcaattgttttaacttttcgggatctagcgactggtcaaacgttaattcgtcgttaccattgaacaggcttgcttgtaaggctggatcaatttcatcaactagttgcgcggtcttagagtacttagcacgcatcacacttgggagcatcgtttgtaagcacgtaatctgaaaggcataggtccgctctgccaaccaacttgataattgaagtaattctgaattcacagccggttgtaaatcaatgaccgccgtaatcggctttaattgcccctcaaaattggcttgatcttgaatggacaaaataaagccttgaattaatcgatcacctttgccaaaaggaaccgccacacgcatcccaggttgaatactgtctaataaagtatccggtacttggtaatcgtatggccgattagtttgcatcgtcggcacatcgacaatcacttttgcgatttgtggcatctgaatcctcctttttagttaagctaacaactcagcaactcgttctagaatttgagtcgcaatcacacttttatccgccaacgctaatgtttccggtactgcattcggttgtaaaagcgtaaccgcattttgatcaacaccaaagccccgatcatgctgactgacatcgttcgccacgagtaaatcaacatttttagctgctagtttggtttgggcattttgtagtaaatcatctgtttctgccgcgaatccgaccaagaattgatgcgtcttctgttgcccaagcgtcgccaaaatatctggggtgcggtctaaagttaactgcatctcagttgtgttcggttgttttttgattttgtgcgtgacatattgggccggtttaaaatcggcaaccgccgcagccatcaccacaacatcggccccttcaaagacactgctaactgtgccttgtaattgcgccgccgtttcaacgtaaattattttgtgcaaaccagccgggactggcaattctggacgcgtgctgatgaggatcacattcgcccccatcgtcacggctgcttgggccactgcataccccattttaccagaagaccggttgccaatgtagcgtaccggatcaattggttcttgtgtcccaccggcagtcaccaccacgttctgcccgcttaaccgttgcggtccgaattgttgcgcaacttctgccataatcgcggtttcttcagggaaccgcccgacgccagcatagccttccgctaaaaagccggtatccggttccatgacagtatagccatctgctttaagttgggttaaattccgttgggtagctggattaaaccacatatgttcattcatcgccggcacaattaatttgggcgcggtagtggctaacaaggcggtcgagacaaagtcgtcagcaatcccattagcgagtttcccgattagattagcagtcgccggagtaatcaccgccagattagtccaatccgctaagtgaatatgggcaacccgatccggttggtcttgattaaacaaatcagttaacacgggtttacgcgttaatgtggcaaacgtcagtggcgtgacaaattcggttgccgcctgagtcattgccacttggacctcagcacctgctttaatcaatccgcgcaccaaattagccactttgtagacggcaatgccacctgtcacataaactgcaattcgtttattcgttaaatccactttcaaaaccccctaaaactaaaaaaactgcactttaatttaaacatccatcgatgaataaactaaacatgcaggttctttaattatttcttattcgccgtctttttgagcgagcttatccattttttcagcatctttttcaagcatcaatgaatcaggatcaataatgacattgccagcagcaatttcttccattgccatcccaaccgttttaggtgatttgtattcagataacatcttaatatcaccggcttcgatttcatgggcccgcttgctagctaaaacagccaatgagtaacgtgagttcacgttttctagtaacttatcaattgaaggatatacaatcatattattattcccctatcattttcttgtattggtcgatcacacgtggcactcgtaagtgttcactttcgataatcttttcgattcgttgaaccgcatttggaatttcgtcgttgacgacagcataatcgtaattttccatcatcttgatttcgtcggctgctttttgcatccgcttatcaatcgtggcttgatcgtctgtgccgcgtttttgaattcgattccgcaattctaataaatcgggtggtgtcaagaagatgaagacgccatcgggacacttctcgcgcacttgcattgcgccttggacttcgatttctaataaaacatcgcgccctgagtctagtgtctgattcacatacttcatcggtgtgccataataattatccacgtactgtgcatactctagcataccatcatttgcaatttcttgctcgaattcttctttgctcacaaaataatagtcaacaccatcttgttcgcctggtcttggctttctcgtcgtcatcgaaactgaatagtgaaaatcacgaaattcatcttctagcattgcttgacggacagttcctttaccgacccctgatgggcctgataaaacgatcaacattcctcgattggacatctacgtaattccctcttcttttataaaatagttaaagtctattttgcactatttggcgggaaatttcaagtctactttgtttccatctcatttaaaattaaccttaaggacgcaatttcgtcgtttgacagcgtcacacccttacccattttggcatgatccggtgcccaatctcgcaaatcaaattttggtgcacgttgattccaagagattaaattcaattctttacgccaaccggctggattttcactcaacacaccgatttctgccataatttcatattcaattttgcccatcaaatcaccctttctatcagctcattctattatacacgaaaaaaatcaaaaaatgccgcttgcaattctgaacatttgttcgtataataaaaacacaaacaagtgttcggaggatgaaatcatggaatttaaacaagcaacggttagcggactcagtcaacaattggttaaacaatatcaccgcttttttgaacttacaccagaagcgactgcttttgttgaacaaccccaaatgcaacctgctcagattcaattatttatgacccaagcgtttgaacgccactaccatgttgcggtgcaattcaatgttaacgatcatctcgaacaagtgaccgggcgcttggttaaacaactcagtgcgaacaagtatctgctaaaagagtgtcgttcgaacctctacaagattgtcctttgcaatcaaattcgttacattcaaaagaaaagttaagcaaaaaataagggtgcagccaaaaaaatattttggctgcacccttattttaatgtcggcgactttgcttagccgtttccgctaatgccactaattcttcggcatgttctaaagttaactctgttacttcagtccccgctaacatccgcgccaattcagcaatccgttgtttaccggttactttttgaacggacgtttccgttcgattttgttttacctgtttttgaatttgatactgatgatcactcattgctgcgacttgcggcaaatgcgtaatgcagagcacttgcgaatgttggccaatttcactaatcttattggcaattgcttgggccacacgcccactcactccggtatcaacttcatcaaagatgatgctagtaacgccttgtgattcggagaaaatcgttttaagggctaacatcaagcgcgataattccccaccagaagcaattttagcgagcggccgtagtttttcaccagggttgggttgaatgtaaaattcaactttgtccatcccggaggccatgaactgttcctgttcatttggcaagaattcaactttaaagaccgtcttttccatgtataacgcttttaactgttgatgaaccgctttttcaagttgcttagctgctttttggcgtaattgtgtcaacgtttgtccgtttgtcctaagttgttgttcaagttgcgtgaattgctgctccaactcacttgcgttcgcttcagttgcttgcatcgctgctagttcagccccgattttttcaccataagcgagaatttcggcaattgaatcaccatacttatgttccaaattattaatagtttctagccgttgttcgatttcatctaaccgtgcttcatcccattctaagtttgaaacttcccgactaatatcaatgctactatcttgcaacgtgtaataaccagtctgcagactgtccgcaatacgcttgaattctggatcgagttcagcaatttcttgcatctgattcattgcaactgcgatttggtctaacgcattcccgtcttctcctgctaaaatcgtgtgactggcttgcaacgcttggttaattttttgaaagttcattagtttggctcgttcttcgactaacttgctttcttcatcagcctgtaattgggctgcatcaatttcgttagtttgaaatttcagcatatccaagcgttgggcccattcttgttcattttgctgtttttgcttcaaggcacgctgtgctttacgataggcagcataggtttcggcataggctgccttcgcggttgttaacttttggtgcgcaaattcatccaacaaccccaagtggcgatctggatacattaattcttggtgttcattttgaccgtgaatatcaactaaggtttctccaatatgcttcaaagtggttgtattgaccaaatgaccgttgacccgacaaacattgtgtccattaacggctaaatcgcgctgtaacaagacggtttgttcgtcgtgttcaatgccaaactggtctaatactgcggcggttgtgccattaggcgtcatcgtaaataagccttcaagggtcgcttttttagcaccagtccggataaagtcttgtgaaccccggccgccagcgagtaacccgactgcatcgataataattgacttaccggctccggtttcccccgagagcaccgtcatcccttcttcaaaactaattgctaactgatcgataattgcaaaatcgtgaatgaccaactcttgtaacatctgatcatccccctttcgtttctcttgatgctaaaaaaacttgccaaattactttagcaagtcttcaataaacttcgtaaactgtttagcattttcttctgatttacaaatcaccaacacggtgtcgtcgccgccaattgtaccaaatacaccactgagctgcatttgatccaaaagattagcaattgccgtcccgttacccggtaaggctttaatcacgacaaaatagtcttgttggttatgcgtaatataggcgtcacgtaaaatccgacgcaacttttctttaacgtctaatttcttttcaggcggtaggctatagtgatagccctcgtccgcatttggcactttaatgagctgcatttctttaatatcccgcgaaatcgtggcttgcgtaacatcgatgtcttccgcttgtaacagcttcacaaaatcctcttgtcgttcaatctcatgggtctggattaaattttttaacagtcgttgccgatctaccttgcgcattaaaacaccctcttcatgtgagaaattattctattcctcaatgatagcgcatttatacataaaatacaaagttttatacactattttcccgttggtcgtttcaaagcagcataggcattctctaaaaccgtatcaatattcacgttttgggccatcgttccagtctcagccgtcgtattccgtagatgaatcaagaattcaatattgccttcgccacctttaattggtgaaaaatctaaccctagcacgtcgtagcctgtcgctaaactaaaatcaacgatgtctttaaccaccatcttatgcactttcggatcacgcacaatcccgtgtttaccgacattttcagggccggcttcgaattgcggcttaattaaagcaaccgcttcgcagtccggtttcaagatgggtttcaacggcaccaaaatcttatgtaacgaaataaacgaaacatccgtcatggcaaaatctggttgaccattggtgaaatcttctggttgactgtaacgaaaattaacccgttccatcacgacgacgcgtggatcttcgcgcaatttccatgctagttggttataacccacatctagtgcgtaacagagtttggccccatttctaagcgccacatcagtaaagccccctgttgaagaaccgatatcaagtgcgattttatcctgtaaatcgatgttgaaaacctcgaccgctttcgccaattttaaagcccctcggccaacatacgaaatcttacgccctttgacacttaaaacagtttcagcgtcgattttttcgcccggtttgtcgattcgttcatcatttttaccgtacacttcaccagccatcacagaccgttttgcttgttctctggaatcaaataatccctgttggactaataatacgtctacccgttcttttttcatctgttctcctattcattaaaatagtttaaaaaactatttaatagtgctttatctaacccggataaatccgttaaagcagtttgcgcggcctgacaagtctcatccaacgcgtcttttgcaccagctaagcccaataagcctgggaaagtattcttatgttcgtcagcatccttatggaccgccttgcccatcgcttctgtagtgcttgtcacgtctaaaatatcatcttggatctgaaatgccaacccataattttgcgcaaaaagctgtaaactagccatttgttcatcggataaatcagccaaaatcgcccctaagccgaccgcgcattcaatcaaacggcccgttttgagctgatggacttgtttcaattgagctaacgataaagttttagtttgtccttcgatatcttcaatctgaccagcaaccatgccacttggaccggctgcttgcgccaataatcgaacagtacggctctgctgatcagtcgtcaaatcggtcgtcgttaaccattcaaatgcaagtgtcaataacccgtcgccggctagaatagcttgcgcctcgccaaaaaccttatggttcgtaggttgaccgcgccgtaagtcatcattatccatcgccggtaaatcatcatgaatcaatgagtagctatgaattaattccaatgcccccgctacgcgatacgccgtttgattaatcggtcgccccacacttgcaagcaccgcaaataccaaaagtggccggagacgtttcccgccagccatcactgaataggtcatcgctttttgcaaggttggttcttcaatctgagcaagttgctcagtcaaataggtttcaaatgcgggcacttgttggcgcgcgaacgttttgaaatcaaccattattcttgtgcctcagcatccaatgggacttcttcgccattatctgccatcactttggccatcgttttttcagccttacttaaggtttcttctaatgtttgacttaatttaacacccttttgaaaagcagtcatcgctttttcaagtggcacatcgcccgtttccagttcattcacaattgcttccaattgtgctaagttctcttcaaatgttaatttcttttctgccatcttattcgtctcctttatgagtggccgtaacacgcgcgttcacgaggccatcttggacatgtaactcgattgattcgtcgaccgtaaaatcggtcgtttttttcattacattttgattatcatccgttacataagcaaatccgcgtcccaaaattttcaacggacttacgagatccaaggctgccaccgcttgtccagcctgttgccgccgattttggacaaggctctcgattgctcgtttcaaacgatgatcggtatcagtcaacattctttgtgcttgttgaatcgcaccacttggtgattgcgactgcaggcgttgctgcaagagttgtacattctgttgactagtctgtaagcgttgttgttgcgccaacaataaacgacggtgcaactgatcgacattttgtaaatagccgtcatacaagcgttgcggctgttttaagacgtaactgttctgtaagtggaccaattgctttttgtttaatgccaatgttttcgaaaatgcctgatataaccgcaaacgttgttgttgcaacttcaacacttcgtccgtcaaaaccggtgttgctaattcagctgctgctgttggtgtcgctgcccgaacatccgccactaaatcagcaatagtcgtgtccgtttcatgaccaactgatgaaatcaccggaatctgactggcaacaatcgcgcgcgcaacgcgttcttcattaaacggccataaatcttcaatcgaaccaccaccacgaccaatgataattgtatcgaaatccccttgttgattaacttgattcagtcgatcgactaaaatatcagccgcaccgtcaccttgaaccaccgctgggaataagacgagttgggcaattggataccgacgttgcgtcgttgttataatatcgcgaataacagccccagaaggactcgtaatcaccgcaatccgttttggaaagcgcggcaatagttgctttggtgcatcaaacaagccttcagccgataatttagcttttagctgttcataggcttgatacaatgcaccaagaccatctggctccatccgttccacatagatctgatagtttccagttgcttcgtacaaggaaatccggcccacaacaagcactttcatcccctcttcaggagtgaacttaatcttttcaaaagcggacttgaacataatggcactgatcttagctttattatcttttaaactaaaatattgatgcgcattcggtcgtaagcggaaatttgaaatttcgccggttaaataaacccgatccaaatacggatcgcgttcaaatttagcctttaaatactgcgttaatgcggtgactgttaaatagtctgttggtttaaccacgtttagcacgttcctttgcaatctcaatcgtttgatccatgagcatcgtaatcgtcattggccccacgccacgcggaactggcgtcatcgcactaacatgtgatttaagggcttcaaaatcgacatcaccggtgactgttccatcttcaagccgattaatgccgacatcgacaacaaccgccccttctttgacatcctcaatgccgaagaagtgtggtttaccgatggccgccactaagatgtcggctgttttcgttagggcttttaagtctgccgttctgctgtgcgcaatcgtgaccgtggcattggcattgagcatcaaggctgccaatggccgaccaacgatgttactccgaccaacaatcacgacatttttgccagccacgtcaatatcgtgagctgccaataagcgcataatcccgtttggcgtacaggccactaagcccggttgattaagccataatcgcccaatattggctgggctaaaaccatcaacgtctttttgtgggtcaatcgcccggataatatggtcttcattaatttgttttggtaatggtaattggactaaaatgccatcaacggtttcatccgtatttagttggcgaacaaccgctaataaatcagcttccgttgtttcagcagacaggcgttttaactcagatgccatgccaattttagtcgctcttttttgcttgctttgcgtataaatcgcacttgctggatcatcacccaccatgacgaccactaatttcggggttaccccttgttgtttgagtgttgccaccgccatttgttgtgcttgtgttaattcatttgcaagtgctcgaccatctagtaattccaaagttaacaacccctatttatcgatatttgatgtttctattttagcatagttaatcggttaattccgggttatcagctgataatgaccgtttaaattcaaaaaaacacgctaaaaaaatactttttaacgtgttttaagtgatttcgttcgtattttactaattaagcttcaacgaatttagataaaacgccgttgataaaaccttttgcttgatcatctgtaaattgtttagcaagttcgagcgcttcattcaacgccactttatcgggtgcttctgttgaattttgcatttcaaacaaccctaaacgcaagataattaaatccggtttggctaaccgtgatagttgccagcccttcttcaagtatggcgttaaagcggcgtctaattctgcttgatgttctgtgacgcccgttaccaagaaggcaaggtagtctggaacagcaacttcttcaacttcttcagcatcgaattgatccatggttaaaacggcttggtaagcatctgccaattctaatgtgtcattagcatttaacgcaaacaacacttgaaatgcagcttggcgaatttggtgtcggttaaaattaggcattaagattggtctccattttgatcaggtgtttcatcgttaaataagtcatctggatcaataatttttggtgctttttcagtgacaacgcccaccacgtgtacgttgacttctgctagttctaaatcagtcatgaacaataattgttctttaagggcttcttgcatcgcaagggcaaccttcggcacagaaacaccatagttcagataaacataaacatccgcattcactttgccatcaatcaccttaagagttacccctttaccgtgattcgaacgaccaaacaattcgttaatggatgatgataacgtcccccgcatttggtggaccccatcaatcttgcttgctgcaatccctaaaatcacttccacaacttcaggtgccatttgaatcttgcccaatgcattttcttgtgtatcaagtacaatatttgtttcttctgccatcgaaacccctcctaacaagttcttgctaatttagcctatgcccgtgagatgtaactcccatcagatgtgttaatcgttaacaaatcaccttcgttaacgaaaaacggtacttggaccactaagccagtttcaagtgttgctggtttagtaccacccgaagatgtatcaccacgaacaccaggttctgttgcagccactgctaaatcaaccgtgtttggtaattcaacccctaaggtttcactaccatacatcatgatagaaacttgcatattttctttcaagtatttcaattcatcattgatttgtgctgctggtaattctaattgttcgtaagtttcagtatccatgaagacgtggttgtcaccatctgcataaagatattgcattgattttgtatcaatgattgctttttcaactttttcagttgaacggaatgtcttttcttgattggcacctgttcttaaattcttaagttttgagcggacaaaagcgccacccttacctggtttaacatgttggaattcaacaatccgccataggttgttgtcaaattcaatggtcaagccatttttaaaatcatttactgataacattgtttatcctccgagcattatataagtatgccattgtcctaatcatagcaagaaatcaggctcaaaagcaagtatttctagccttttatccctaaaagtagctataaaaaaagggaccggcacccgccaatcccttttagcgtattcaatcaagcaaaagtcgatctgaacactcacttttagattgtcaatggtttgttgcctgagtaattagtataccagtaaaactggatttacacaaacagagtgtgacatcagtctgggatatctcgaggattaacacagagttgcaaaagattgtggagcaatcatttgtgactcagggttaaccggagagatatgactgatggaacacgtttagaatgtgacgacacccccgcttctctcgcacaaaaaaacacccacataaagtgggtgttagaaaaattatttagcttctgcagcgtatacagaaacctttttcttgtttttaccgaggcgttcgaaacgaacgacaccttcgataagagcaaataatgtgtcatcgccaccgcgaccaacattttcacctggatgaatctttgtaccgcgttgacggtaaagaattgaaccagctgttacagtttggccatcagcacgtttagaacctaaacgacgacctgcagagttacggccgttagttgttgaaccgccacccttatggtgagagaagaattgtaaattcatttgtaacatctaaatgcacctcctgtttattaactgtctatttacgttttgtttgtacttgaatgtactgcccgtattgttgcgtaatatcttcaagcgtcaactgcaaattctgcaagagaatctgagctgtcgctaaagcttggcccgaaaccgttgccggaatctgacaagttaacaaaccaccattcaggttatctgcttctacctctggttcaaaaccagcaagcttttgcaaactgttgattgtcccgattgagacagcagaaacagctgcacagacgatatcactcccgtaaggacccgagtcggcatgacccgtaatttgaaaagaaataatttgcgaatcggcattgaccgtaaagtcagcttgaatcatcctatttccctcaattaggcgttgatagcgtcgatcatcactttagtatatggttgacgatgacccttcttttgatgactgtgtttcttaggtttgtatttgaaagtaacaactttcttttcgcgcccttgtttttcaacagtaccatcaacagtaacaccatcaatgtttggtgtaccaaccttagttgtttcaccaccaactaaaataacttgatcaaaagttactttttcgccagcttctgcggctaacttttcaacgtagattgcttgaccagcttctaccttatattgtttgccacctgttttgataattgcgtacatgtgtgcacctcctattttttcttagactcgccaactaaggtgactaatcatagtacttaatgccttagtatgcgcggttgcagctgtggagctcacaattacaacgctcatattatatcgaatatcacagggcgagtcaatgctttattacgcctcgacaaaaaattgtgcgacatcgaacgtcgtattaggtgtttgtaccaattggtataacatcttagccatgtagcgtggtgaatacacaagcccgtcattgacccacttaaagaccaacgctaaactggcccccgctaaataatcaatcgtaatactcatctcaatttgatcagcctgtgaagtctgattatagcgcttagccacgtaatcctgcattaattggcgcattgattcagtcagttgtgcctgaaagtgaagcgtcgcctcatttttatagaacactttaaaagcagcttgttgttgttcaacatattcaaaaagtgcctgtaaactgacctgacgatatgtctgatcgaccactacagtcacttgctgataaaaatcggccaccaaatcggccaccgcggttcggatgaaatccactttatcttcataatggagataaaaggtcccgcgagtaattgccgcttgcttggtgattgcttgaatcgaaatcccctttggcgtactgtctttcagcaagataatgagggcttgacgtaattgttgctttgttcgttgaacacgtggatcttgcgctcgtaaatctgtctcacgaaccatctgatagttcccccaatcttttaattaaattcacctgtcgatagtatagccgctcagtgaaaagtctgtccattaatcggcttgataacggccctcgatcagttgaatatcccctagtgtacactgtaaatttgaagattctgttaacgaacacccaaaaagtaaactttatcccccacaaatttaattgttgttcgtctgcggttatagtaaaatgagcgtagtatttcaaatcggatagcgttaggtggtcgtcactttgatttctgcattcttcattattttcatttcaatcgttttattcgccgtcattgctagtcaattgactttcaaaatcggcttaatcacaaattgcgtgctctttatcattttagttggtgttgatgcttatctattcagctggggtagtggttctcactgggtgtacgttattgtcagcctactcggattagtcgctagcgaattattattagctgaactcccccatcttaaataattaggttaacgtcaaaaagcggtccaactcatcattgagttgaaccgctttttttagtgcccctgccaaggactctcagtataccatattaatcaagtaaggttgtttctttcacttcatcaattgtcttggtaccagccaactgcatggtaatcgataattcatggtttaagtgttcaaaaacagattgtaccccttgggcgccacctaaatttaaaccataaataattggccgaccaatggccactaaatcagccccacttgcgagtgctttaaagacatgttcaccacggcgaataccactatcaaaaacgattgggacgcgttttgcgacttgttgcgcaattaaaggcaacacttcaaaagaagcaggcccgccatctaattgacgcccaccgtgatttgaaacccagatgccatctgcaccagcttgaatggcaatttcagcatccactggtgattgaatgcctttaacaaagactggcaaatttgtgatttgtttaatcttttgaatatcttctggtactaatccttgtttagcggcagcataaatttcagagatgcccttcccagcaccgtcagaattactataagctgctaaattaggcattggtagtgggaattggaattgcgtctcgatgtccgcttcacgataaccacccaatgttgaatcgacggtgagaataatggcttttacacctgccttaacggcttttttcaataagaactcattgaattgatcatctttactcatatagagttggaaaaattggggggcatcaggagccgctgcggctgcatcttccaccaatgtattggcataggtactaattgagaaaatcgaaccagccgctgcgacccctttagcagtgtcgacttcccctttttcatgtgctaacccttgggctgctgagggggcttgaataatcggcgtttttaaatcaatatcccataatttagtatgtaaatcagcatgatcgatgccttttaacacacggggcattatttttttagtattgaaagcactggtattttcagccatcgtccattcgtcttcagcaccgccacggatatagccaaacgcgccagcttccattcgttctttcacgcgtccttctaacgacgctaagtttaaaatatcgattggattttccgcttcacttgtatgatatcccatgatagattccttctttcaataattgaatacctttatcatagttctcttattaaaagtaagcaaacatttatactcggttatttcacttgcgttcgaaatccaatgtcttgccggtaaaaagtcgtcggtaaagcgagttgcgctaaatcccgatagacctgttgactagctcggcctagcgtctcagcagaataactagcggtatacaaacgcccgccagcgctgaccaattgattggcttgttctgcgacactagcgaaactaaatgtgctgttgcgttttgcaaattgttgcaaagtgggtaaaacaaacggcgttgtcgattgtgtcgggtaaccatctgaagccaccacaacacctaacgtaatgcctgataattgccactgtaacgttggggtttcccccttcaataattgtgcaaaaacttgggcccagtcgcccgtcatccgtggtagcaccacttgtgtttcaggatcaccaaagcgcacattaaactcaatcactttcaccccgtgttgtgtggcaattaagcccgcatacaagacaccggtaaaaggcgtttgacgttcagccatcgttgccacaatcggttctaaaatagtcgttaccgcttctgcaacgcattggtcactaatctggggtactggacaataagcgcccatcccacctgtattaggcccacgatccccgtcaaaggcgcgcttatgatcttgagcaaccggtaatggatagacgcgattattcgccaccaacgccatcagcgagaactcttcaccttcgagataatcttctatcaataactggggcacgccctgttcaaagaacgcctgaacagtttgccgcgcgctcacgtcattttgagcgatgacgacgcccttgccagccgctaaaccatccgctttaatcacaacgggataacgaacgtcatcgagggcatccagtgccgcttggacagtctgataggcttgataagccgccgttggcacatgcgcggccgccataatttctttggcgaaagttttagacccttccaatgccgcagctgctttacgcggtccaaagatcgctaatccagcgtcttgaaaagcatccactacgccagccactaacggttgttcaggcccaacaatcgtataggcgacctttttggcctgcgcaaaggcaatcatcgctgcaaagtcagtcatctcaatcgcaactgtttgaatcccatccaattgtatccccggattgcccggcaaacaatagaccgttgcaacagttgaactctgctgtagcgcacgcgcaatcgtgtgttcacgcgcgccgctaccgattactaatagatccatgatttgcctcctattggctagtgtttgaaatgacggcgaccagtcgtcaccatactgattcctttttggttggccatgtcgattgaatcttgatccttaatcgaaccaccaggttgaataacagctgtcacaccatgttctgcggcgtattcaacgctgtcatccattgggaaaaaggcgtcagatgctaagacgaacggtgcttttaatccattggcttccgcttgttcgattgcaatcttcacagagcccacccgattcatttgccccgcaccaatgccgagggtttggtcctttgttgcgaccacgatggcattactcttaacgtgtttaaccacacgttgggcaaataacatcgcagcttgttcatcagccgttggtgttttgtccgtcacaaccttcaattcagatgcttgatcagtcacccgatcacgttcttgcacgagtaagccgcctaaaacagaaaccatttcgaagcgatccgcttgcttagcagcctcaaaatcaagcgtcatgacgcgtaaattcttcttcttttctaaaatggctaacgcttctggggtgtagcttggtgcgatgataatttctaagaataaactgtgtaattcttcggctgtttgaacatccacttcacgattcaaggcaatgatccccccgaaaatcgatactggatcggccgcgtaggctttttgccaagcttcatagatggttgcacccaagccgacgccacacggattcatatgtttcatcgcaaccacacaaggttcgctgaattctgcgaccactttaaccgccgcatccgcatctttaatgttgttatacgataattctttcccgtgtaattgtaccgctgaggcaatcgagaaagccgttggtaaactgctttgatagaacgctgctttttgatgggcattttccccatagcgcaacgcttgtttaaagtcgtatgaacgtgttaatttttcagggaattcgatgccgactgcttcggttaaataaccggcaattaagctatcataagctgccgtgtggcggaatgccttggctgctaaataacgacggtaatcaactgcagcttgcccctcatcgacgacgtgttcgaggacttgcgcgtaatcttgttgatcaacgaccacgtacactgatttgaagtttttagcggcagaacgcaccattgaaggtccgccaatatcaatttgttctacagcttgcgcttcagtaatccctggtttttgaattgtttctttaaaaggatacagattgacacaaactaaatcgattgtctggatgtcatgggctgctaaagcggccatgtgtgttggttcgtcgcgtttggcaagcaagccaccatgaatattgggatgaagtgttttaacccgtccatccaacatttctgggaaatgagtgacttcatcaatcgcaattactggtacttgcgcttcttgtaataccttgaatgtcccgcctgttgagatcacctcgtaaccagctgctactaatcctttagcaaattcaataattcctgttttatctgaaacactgaccaacgctcttttcattgattgaattactccttctattttggtttttaattaattcagcaacaacttgcggataaatcgcgtgctctgtgtcgtgcacgcgttgttccaatgcggctaaactatcgccaggcaacaatggtacttttgcttggacaatcatcggaccgctatcgacaccttcatcgatgtagtgaatcgtaacgcccgtttcagccacttgtgccgcataggcccgttcaatacttcgtaacccagaaaaggccggtagtaacgatggatgaatattgataatccgttgtgggtaggcatgcaacaatactggggtaatcacccgcatataacctgctagcaatatataatccaactgtaacggtgccaacagcgcgacaattgctgcttcatagtgttgtcgatcatcataatcacttaagcggatgaccgtcaccggtacatttcgttggcgcgctttttcaatcaccggtgcgcccggctggtcacacactaaattcataatctccatgcccgctttttttaaggcatcatcatctgcgagcgcttcaaagttagaacccgttccagaagcaaaaatcgccactttcatctcatcaacccaccaattctattgcattttcttgtcgcggtttaaccgacccaattcggtaagcctgttcttgttcagcgttcaattgggcgaggacttgtgccgctttttctggtgcgacggctaagaccatcccgatccccatgttaaaaatgttatacatctcgagtgcatccaattgcccatattgtttaagtgccgcaaaaatcggtaagcttggccatgttcccaattgaatttcggccatcacgttgtcaggcaacatccgcggtatattttcaataaagcctccaccagtaatgtgggccgcgcccttaataaagccttgttcgataaacggctgacatgcttgtgtataaatccgcgttggtgttaatagccattcaccgagtgtctgaccaggcaattcgggtaagtgactgtcgacggacaacccatgttgttcgaagaaaatttggcgcacaagtgagtagccattcgaatgaatcccactggacgcgattccgattaatacatcccctgtttgaatcgtttcaccagtaattaattgagcttgatcagcaattccgactgcaaaacccgctaaatcataatgtttttcagcatacatacccggcatctcggccgtttcaccaccgattaacagcatgtcagcagcttggcagcctgcaacaacgccgctgacaatttgttcgatcttatccggctgcgtttgaccagccgctaagtaatctaagaaataaagtggcttagcgccttgggcaacaatgtcattgacacacatcgcgacacaatcaatcccgatggtcgcgtgtgcatcagctgcaaaagcaaccatcaacttggtcccgaccccatcggtacttgaaacgagcaccggattttcatactgccccatcgctaaggcaaactgaccaccgaagcgaccaatattttgattggttgcgccgacctgcttttgaatccgacgaaccacttcgtaaccggctgtcacatccaccccggctttttggtaagcatttgtcatgattgttgctccttatctgcttttaaacttgcctggtaggcagcttcataatcgtaaagtggcgttggatagtcgccgttgaaatacgccatacataatccggaatacggcgcatcttgctgtaacccaatcgcgtcgattaatccctgttcactcaaaaagccaagtgaatccgcgccaatcgtggcacacatctcagcaatactttgatgcgcggcaatcagttcatcacgtgtttgaatatcaatcccataaaaacaagggtacttcaatggtggggacgcaatccgcaaatgcacggataatgcgcccgcttctttcaaacgtttcacgatgtgcttgctggtcgtcccacgcacaatcgagtcatccactaaaacgattcgtttaccagccacaacacttttaaccacggcgagtttgcggtttaccccttgttcacgaagggcttgcgttggttcaatgaacgtccgccccacgtattgatttttaacgaggcccatttcatacggcaaaccactttcctcggcatagccactagcggccgataacgatgaattcggcaccccaattaccatatccgcatcaactgcggtttcgcgtgctaactgtttccccattcgtttgcgggccgcatggacgttaatcccacagatatcagaatccgggcgagcaaagtagatatattccattgaacagattgaatgcgtggtttcggttgtgaagaagtcagaatgtaacccgtccgcatcaatcgtcacaatttcgcctggctgcacatctcggataaaagttgcttgaacggtattgagcgcacaggtttcactggccacaacgtagcccccgtttgctaaacgtccaatcgagagtggtcgaaagccgttgggatcaagcatcgcaatcaatgaatcttgcgttaataataggtaggcaaagcccccacgaatttgttgaagggccgtcttaatttgcgcgtgcaaatcaggcccttctgcacgtcgaatcagatgcatcagaatttcagaatcagagctcgattttaagatggcccccgattgttcaagcatgcggcgcagtgtgaccgcgttggttaaattaccattgtgtgcaagtgcgaattgatcggttgcaaaatcgaataggaacggctgaatattttctaaaccgtgactaccagcggtcgcataacggacatgaccgattgccgcgtccccggttagttgggttaagtgctccggtttgcggaaaacatctgccaacaaaccacgattgcgataacccattaagtgcccgtgatcattagtgacaatgccggcaccttcttgcccacgatgttgcaaactatgcaagccaaaataagtcatttggtttgcttctggactaccccaaatcccaaaaacaccacattcttcatttaaactttttatttcatttgacatggtatcgccgtctcccaacttaacttcgcttcagtcaccgataactcaacagttgattcagtcgtttgcacttgcataattggcgtggccgagaccgtcccaattaattgcgcctgatcttgacagaacgcttcaaacgccgtctgattttctggccgaaccgtgatgataaagcgggattgcgtttcaacaaataactgttgttgattaagggggacttgcacgcggcagccgagttgttctttaaaagtcatttcggctaacgcaaccgcaaaaccaccctctgataaatcatgtgcgctagtcacccagcccttttgaatcgctgctaagacgcaatcttgactcgctttttcagtggctaacgaaaagccgcttaatcgtcctgcaactttgcccgtcaacatcttttggagttccgaacccgctaaattcgtatccgtctggccaacgaggtagattaaatcccccgctgacttaaaatcttgcgtcgtgatgtcggctgtatctcgaatcaaaccgaccatcccaatcatcggtgttggataaatcgcttcgccattgaattcgttataaaaagaaacattaccagagatgaccggcgtatcgaaaacctcgcaggccgccgcaatcccttgggcactttgatcaaattcccagaatacctctggcttttccggattgccatagttcaaacaatccgtaattcccagtggttggccccctgccgcaacgatattccgtgctgcttcggcaactgccacttgcccaccgacttttggatcgaggtataagtaacgcccgttacaatccgtcgtcatcgcgagcgcttttttagtcccacgaattcggacgaccgccgcatcgcttcctggtaaaacgacggtattggtcttcacttgtgcatcatagtggctgtatagcgagcgtttgtcagcaatcgtggattggcccaataaatcgagccatgttcgtttaacatcattaatcaccgactgataaggcgccatcgctttaaattcagcgatgcgtgctggttcagtttgtgctttatgataaatcggcgcatcactcgttaaagccgccactggcaaatcggccactaattgcccaccatgccacaattgatattgttgactctcagtcacttcaccaatccggaccgcatccagatcatatcgttcaaacaaggcaaccacatctgtttcatgaccagctttaacacaaagcgccatccgttcttgcgattcagaaagcatgatttcataagcggacatctctgtttctcgttgtggcacaagatcaagattgagaatcatcccagtacctgccttttcagccatttccgctgttgaagaaactaagcccgccgcacccatatcctggatgccgactagccaatctggatgcttcaaaattaattccaaacaagcatccattaatagtttttccataaacggatcacccacttggactgctgagcgttgggtcgccttgccatctgcaaattcatccgatgcaaaagtggccccgtgaatcccatcgcggccggttttagccccgacgtagaacacactattgccagcaccacgcgctttaccttgctgaatatccttttggtcgatgacaccaacgcacatcgcgttgacgagtggattagtctgataacatggatcaaatccgatttcaccaccgaccgttggaatcccgatacaattaccgtacccgccgattccagccacaacttcttgaacaaggtatttcgtgtggtcatccgtcaattcaccaaagcgcagactgttcaaaagcgcaatcggcgtcgcgcccatcgaaaaaatatcccgaataataccgccgacaccggtggccgccccttcatagggttcgactgctgagggatggttatggctttcagctttaaagaccactgcttgaccatcgccaatatccaaaatcccagcgccttcacctgggccttgcaacacgtgctgaccacttgttggaaattttttcaaaaccggcttcgaatttttatatgagcaatgttcactccacatcactgaaaataacccggtctccgtataattcggcaaccgttttagaattttagtacgaatcaattcatattcatcatctgataacccccattgctgataaagcttggtggcttggatttctgccggtgttggttgctttaacacggttattgccctccttttcgaatcgatgtgattaatgctgcaaataaacgttgcccatcatcgctacctaataaggtttcgactgcgcgttctggatggggcatcatccctaagacattgccggcttcattcgtaacgcccgcaatattcgctaaactaccattcacatcattttgataagtaaatgcaatttggtggttcacttttaaccgttccagggtctctgcatcgcaataataattcccttcaccatgagcaatcggcagccgaatttgttcgttcggcatatagtgttgggtgaacatcgtaccggcattggtcacgttcaacgcgactgtgtcacagataaaatgggtttgtcgattcggcaaaagaacgcctggtaataacccgagttccgttaaaatttggaacccgttgcaaataccgataaccggtttgccagcagccgcaaacgccttaactgccgtcataatcggtgccaacttggcaatcgcaccactgcgtaaataatcgccgtatgaaaagcccccgggcactaatacggcatcaaaacctgccaggctagttgctgtgtacgggatatactcagcgttttcatgacaaacatcttcaattgcatgatataaatcagcgtcacaattggaacctgggaaaactaatacggcaaatttcattgattcgtcgccaccttttgtatgtcgtagtggtattgttccatattaggattggctaagagttgatcacagatttgtgcgacctttttttcaactgcggcttggtcatcgccagccacttgcatttcaaaggacttgccaatgcgcatgccgctcacaccatcaaagccaagtcgttcgatagctttttggacagcctggccttgtggatctagcaccgaatctttataagtcacttgcacacgcacattaaacatctgtagaaccccctaaaattttttctaatcgtcgtaatacgacatcgtacaccgatactaaatcccctttgttcaagcggaaaacatccttatctagcgattcatgcgtcgtttgatcccacagacggcagttatctggggaaaattcatccgccaaaatcaagcgaccgtcataccggccaaattccaacttaaagtcgattaaatcgatatccgcacggtcgaataaatcgattagcagctggttgatctgcttagtttgtttttcaatcacttcaatttccgccggtgtcacaattccaagcgcggtggcttgcgaaatattgatggctggatcatctagtgcatcatttttgtaatagtattcgataatcggcgtggccaatcgtttgcccggtgcttgaccaaacttgcgggcaaaactccctgccaccacgttgcgcaatactacttctaggggcacaatcgtcactttcttgacgagctgttcagttgctgaaatattctcgattaaatgcgtttcaataccatttgccatcaagtatttgaaaattaatttcgaaatctgataattcaataatccttttcccgtaatctgttccttgcgtttgccatttaacgccgttgcttggtccttatagaccattctcaacacattttgatcgtcagttgtaaaaacatctttcgcttttccagaataaaacaacgtctcactcatgcttgaatccctccaaataacatacattttatttaaaattaaaataatcgttcgtgttacattagggtgtaaaaaaactttgaaataacctcatttcaaagttttcatcattattcgcccaaaccaacgcggtcaaagatttctgcgacgcggcgaatatggtaatggtaatcaaacgcgtcgtctaaatcagcgggcgtcaacacattcataatccggtcatccgcttctaacaacggtctgaaatcagtttgttgatcccaagcttgggccgttttaggttgaatcaagtcataagccgcttctctcgaaagcccatgatcgattaacttcaaaagaacccgttggctgtaaatcaacccgaaagtccgccccatattacgcttcatattttctgggaagactgtcaagtccgtcataattttggtgaaccgtcgaagcatataatccaacaaaatcgtagtatccggtaagatgatgcgttcggcagaactatgcgaaatatcacgttcatgccagagtgcaacgtcttcatacgccgttaccatgtgtccgcgaatcacgcgtgccaagcccgtaatattttcagaaccaatcggattccgtttatggggcattgctgatgagcctttttggcctttcgcgaaaaattcttcgacctcgcgggtttcagatttttggagaccccgaatttcagtcgcaaacttctcgattgaagttgctagtaacgccatttcagccacgtaggcagcatgcaagtcccgtggtaagacttgtgttgagatttcttgggcgcgaattcctaaatgttcgcacacataggcttcgacaaacggtggaatattggcaaacgtgcccaccgccccactaattttaccggcttcaacgccttttgcagcttcttcaaaatgtgccttatgtcgttttaattccgaataccatagtgctagcttcaacccaaacgtcgttggttcagcgtgaacaccatgcgtccggcccatcatgaccgtatcttggtaacgtttggcttgtttggcaatcaccgccaatagcgcatcgatatcggcccgcaaaatggtgttggcttgtttcaacaaataaccatacgccgtatccaccacatcggtcgatgttaaaccatagtggacccacttgcgttcatctccaagtgattcagaaactgctctggtgaaggcgacaacatcgtgccgcgtttcctgttcgatttctaagatccgtggaattgagaacatcgcattggcacgaattttcgcaacatcttcagccggaatgtgtccgagttctgaccaagcctcatccgctaaaatttcaactgccagccatgcctcatatttattctggtccgtccaaatcgcacccatttcaggatttgtataccgttcaatcatttattagcgtcccctctagtcccaaattttagtctttttaattgccgttaacgtttcatcaacagccggcgttaataacgtgacgtggcccatcttgcggttgaccttttgaaccactttgccatagtcgtgataatgccaatctgctgactgccgactggctgttagcgctgcttgccagtgctgcccaagaatattgaccattaccgctgattgccacaattgtggtatttggagtggccagttgcagacgccccgaatgtgggttgcaaattgagaaaagtcacacgcttcaatcgttagatgacctgaattatgcggccgcggtgcaatctcattaacgtagagttgcccgtcatggccgacaaaaaactcgacacctaacgtgccgactaattcaatctgcgtggcaatttttgccgcaaccgattccgcttgtgccgctaacgccgctgaaatgcgcgccgggcagatgctgatatgtaaaatgttatctcggtgttgattctcgattgcgggaaaagcggcttgttgcccggctgaattctgactaattatgaccgaaatttcttgatcaaaatggaccatcgcttctaatacacaaacactagcggttaacaactgttgagccacctccatatccattgcggaccgtagaatgacttgtcctttaccatcatatccaccgcgcgtggtcttcaagatacaaggaaaaccaacttttttaacagctggtattaattctgcaggggtcgttacaatctcaaaggtggcatgtggtagctgttggtcaacaagaaattgtttctccaacaatcggtcttgagcaatccgtagcgccttcgtcccttgaggaatccatgtatattctcgggcagcttcaatcgtcttagcatcgacgttttcaaattcatatgtcaacacatcgacacgttgcgctaacatcataatttgtgcctgatcatcataagctgccacaatttgatcatccgcgacttgtccggctggacagtctgcctgcggatctaagataatcactgcaaaccccatctctttagccgctaatgtcatcatctgacctaactgaccgcccccaacaatcccaatcgtttgccctggtaaaatttggttagtcaaagtctgcattacttgccaccgcctttgcatgcatccgtgcttgatactgttgcagtgccacttgataagctgggacctgcaagccacaaatctgtgtcgctaaaataccagcgttaacggcccccgctttaccaatcgcaaccgtcgccactggtacgccacctggcatttgcacaattgataataaagaatccagcccactaagtgccttactttgaattggcacgccaatgactggtaagactgtattggcagcaatcatccccggcaaatgtgcggcaccacccgcaccagcaataatcgcacgatacccgttcgcctgtgcttcttttgaaaaggcgaacatttcatccggcatccgatgagcagaaataatctgtttcgtataactcacgcccaactccgataatacagaagcggtctgttccattgttccccaatctgatatagagcccataacaagtgccacatcactcatattctttgcccactttctcgttgttgattatgctttgattctaacaatcttcatctgatatgtcaaaatattttacgaactattttacataaatccatttaataattcgtatttaaatcagaaatacacaaaaaaacgattaacctgttggttaatcgttttttatcgttatggcaatacaacgaagagtaatgcacctaaaatcccaccgatgattggaccgacaactgggatccagctgtatgaccagtctgaatcacccttgttggcaatcggcaagactgcatgggcaatccgtgggcctaaatctcgagccgggttaatcgcgtaaccagtcgtcccaccaagtgatagaccgattgctgtgataaccaccccaaccactaatgggttcaaaccggctgttaattcaccacgtgttaatgctaataaagcgaagattaagacgaatgtcccaatcaattcactcattaaattggcaaatgggctgcgaatcgcagggccagttgcaaaagtgcctaagattgctgcttgatctttagtagcttgccaatgtggatagtattgaatccaaacgacaactgcgcctaagaacgccccaatcatttgggcgataatgaatggtaccaccgctgcccaaggggtcttgccaatcattgcaaaagcaatcgtcaccgctgggttcaagtgtgcaggtcccataaatgcagaggtatatacccctaaagtaaccgcaaagccccaaccaagcgtgatagcaacccagccagcaccgttggcttttgtttttgctaagctaacgcccgctacaacgccatcccctaaaagaacaaggataaacgtcccaacaagttcaccaagcgcctgaaccattattgaatgttccatgagatttcctccaagttaagtcctattttaaatagtctaattgtgcttcagcaattgctgaatccaataattctgtttgacgtgctttttcagcgtcatcccagttcaataaacgcgccatttcatcaacaactggttgtttgatggctgctaattgatcattgtggaataagatgaagtttgtccgtcttaaaagataatcaactggtgttaatgtcatttcttcgttaactgagtatcttaagctgattgtttctttcaagttcaagccttcagcagcaccttggtccgcgtatgaaacaacccggctgacgtttgaaccgaagcggtttgctaaatcaatcgcatcttcttcatcaatccctttgttcatcgcaacttttgcatagaatttaagggtatcatccacgttatttggatcgaagtgcccacctgaaacttgtaatttcttagaatcgatttcacgaactgtttcattgaaatctttcttcaagatatcccggattaattcaagcgcaccggctgccatcttacgataatcagtaatcttaccacctgataaagtgattaagccgttttcagccactttcaaatcactaccacgagaaacttgtgatgggttgactgattcttcagcatgcgccgttcttaattgactgattgctttttcaacatctgcacgagcagctgttttgttttcgtaatcatcaactgtcttgattaagttgttgaatgattcttctgaaaccttaccgctattagcgccaccaccgttataatcggagctaccgttattagaaattaatggtcgtaaacctgcccagctagcttcaatatcgtttaaagcgatattaacgctaggatagcgattgttgattgcttttaagaggtaatcaacgtctgcttgttcaacacgtgggtgtttgaaatcgcctgtgtaatcagtatcagttgtcccgaagtacgtcttaccttcgcgtggcacaacgaaaatcatccgaccatcatgtaagcctgaatcgaagtaagttggttgtggcactgataaacgactactatcaacaactaaatgaatccctttagtaggacgaagtgtttcttgtgctttgacttccgtgtttaaagcatttactttatccacccaagggccagcagtattaatgactaatttggcatgaatatcgaatgtttcatccgttaattcatcgtgtgctttcaaaccgtttacgcgaccgtttgcatcataagtcattccgactgctttaacgtgacttgcgattgatgcacctaattcgtcagcttctttaatattttcgatgactaagcgcgcatcattattgacgaaatctaaataaacaccagcacccatcaaacggtctgacttcaagccaggttcgcgttggagtacttctttacgatcaattgtatagttggcatattgtgtaccagttacccctgccaatttatcgtataaatccatggcaatcttgacactgaacatgtcgtaagttgcttcaggttcatcatagattggtaaaagcattggtgtaggccgtgggatgtgaggtgcaatcccttgaacaacggcccgttcactaacagtatctgcaacaaccccaacgtcgaaagtctttaaataacggataccaccgtgaactaacttcgttgaacgtgatgaagtcccttcagcaaaatcttgcatttcaatcaaaccggttttgatgcctgatgcagccgcttgaatagcaaccccagcaccagtgatcccgccaccgattactaataaatcaagttgttcgttctttaagttattaattacttgttgacgtccttctaatgaaaatgtcattataatcctcctcattcacgcattttatatggtcgatgtttgaaaacctttgttgcttcaactgcttgttgccaaccagcatagagatcttcccgttcttcttcaggcatttctggttcgaaacgttgcccaactgagaaaatatgcgccaattcgtctgtatcttgccagaaaccaactgctaaaccagccaaaaatgcagcccccattgcagttgtttctaaattagctgccttttcaatcgagctattcaaaatatctgcttggaattgcattaaatagttgttgtttgcagcaccaccatcaacgcggagcactttgatatcaatgccagtatctttttgcatggtttgaacgacatcccgagtttgataagctaatgattgcagtgttgccttaataacgtcttgtcggttcgtcccacgcgtaatccctagaattgaaccacgtgcttctgagtcccagtatggtgcacccaaacctgtaaaggcaggcacaacataaacttcatttaaactggttgaagccttagcggctgcttctgaatctgatgatttttcaaccagttgcatactatcacgcaaccattgaatggctgaaccagcaacgaagactgagccttcaagtgcatagttgactttaccattgattgaataaccaattgtcgttagcaagttgttttctgacattgttggtttttcgccagtattcatcacaataaatgaacctgtcccataggtgttcttaaccatccctggttggagagctaattgaccaaataatgcggcttgttgatcccctgccatccctgaaattggtaccgtgctaccatagaaatgataaggtgctgtttcaccataaatttcagagtttgaccgaacatcaggtaacatggcccgtggaatgtttaaaatcttgaggatttcgtcgtcccaatccaaatcgtgaatgttaaacaacattgtccgacttgcatttgtatagtcggtaacgtgtgaagcgccacctgttaacttccatgtaatccaagtatcgatggttccaaagaggagttcgcccttttcggctcgttcttgtgcacctggcacttgatccaaaatccaacgaatcttagtcgctgagaagtaagcatcaattaatagccccgtcttttgatggaataattcttcatgcccatctttcttcaattgttcggcaatgtcatttgtttgtcttgattgccaaacaaccgcattataaattggtaaaccagtttccttatcccaaataatagttgtttcacgttgattagtaatcccaatccccgcgatttgatggggttgaatccccgatgatataaaagcgtttgcaatcgtcgataaaacagcgttccaaatttcgtttgcattatgttctacccagcccggttcggggaagtactgggggaattcacgctgtgcatcggcgactttttgaccattgtgatcaaaaatgattgaacgagtactggttgttccctcatcaatcgccaaaatgtatttttcagtcatcttaatcctcctttaacaacaatgttaggaaaacgtttcctcgaaaactattatagattaccgatgtccaaaaagaaagcgttttacccaaattaaattttacacaatttaacatccttaccaattcggcatttgtagcacatccaaaattaaaaaacgggtcaataatctcagatcaacactaattaaagtccttcatctgaatcattaaacccgtttttttacttaaatcgttgcagttattttagtatataattcaccgttcatcttgctgagcgaaaccttttcgttcttttcgtttgaaaataacacgatatagattcggccaccgtggctaaatccgttcgacacattccagcctgacaaataaccacgattaacaatgagtgctggatcattgtaaaagcccattccatagtgggacgtactccctagttggaacatttgagccttactctgttcattaattaattttccagtccacaacgcgcggtcaaaacggtacatatcagtcgccgtcatatacatatctccgacccctggtagttgcgtgaaattggggagttgtcccgcagcgccatttgccagatagccaatggaagccgctggtaatcgcgaatattgatccgtcatgaaaccagtgtgcgccattttacttggttttagaattttttcttttagatacgttttgtaatcttgatgactcactttttccaaaaccttcgtcagcacaatatagttcgcatccatatagtgccacttgcccggttgttccttaatcccatttttaataatttcttcgattaattggtcgagagtcttcgtctgattatcttggtcccgaccgacaatgcctgatgtatgatgtaaaaaatcagtcagtttaatctgctgcccattcggaaagtccgggaggtaccgactgattggatcgttgacgtttagctttccttgttcttgtaactgcaataaactcgttgcaatcaacgctttttcagttgaaccaatcgcatatagcgtatctggcgtattcaccaactgcttggcccgattagcactgccgtaccccttatccaacaaaacttgcttatcgcggacaattaacgcggtacctgaaaagccaatttgctttaagtagtcatctaacgcttgttctgcaacaattgtcggttggctttctgctttaagtcgttcttcctttgctttagcagcagcgactttttgtgattcgcgctgtttctttgcttcttgcgcttgtcgttggcgcttaatcttggcttgttgttgcgcgatttttacttctcgttggtgatgttgtcgctgaaccacaattccgcccgctaccagaccgaatatgaccagaataccaatgacaccaccaatttgacgccctttttttgacatcaactgtccctccgaaatttctaatctatccattaatttattacaatattaatgtacaatacgcttttggatttgaacagtgacattattgtcatctaaccacacgtaaaaaagcggttgcgacaaaaaatgtcgtgaccgcttttttggaaccagacgttcttatttaactaataaaacattcgttgcagcatgggcactaacatattgggcaaccgatcccatcatcattcgttcaataacccctttccccgtaatccccaacatgattaaatcaatcccatattcttcaggaatgcgaatcgcaatttcttttttcggtgagccgacttccagaatcggggtgaccttcgttagcccatgattattcgcgtaacgaatattagccgctagttgctccttcacacgatctttttccatcgccgtcatcttcgcatagacactagcatccggtgaaacatagactgtacttggaataatatgagccacataaagctcagcatcatttcttttcgcaacttcaacagcttccataaatgccttgttcgctaagtcagatccatcgaccccgactaaaattttcttatacgttgtaatcatttagcaacaccctcctattaatgaaatgaatgcgaatcctaattatatgttcatcatactgaacccaataggaccttgacaatttaactgcctaaacaaaagacatatcgttaatagctatagtaccgtcgatggtgcacgaattcgagttaaagaattggcatctctaaaaagcctaatatatactgaccctaagttaattaacgaaagcacttactagctatctcatgcactcatttctaaatcaatcaacttaaataataatttgaaaaagaaaggactgtcacatatggatattgtcataaccggtgggacatctgggattggctatcgcattgccaaagatctcattgcagaaggccatcaagtcattatcattggacaggatgcggaaaaaggccgggcttctgtggcccaacttggaaaagcggccttttttatccaagccgatttagcgaccaaatcaggacgcaaccaagcactggcaagcatcaaatataaagtggataaaatacacgttctagtgcacactgccggtgttttccccagctcagcagaagaaaatattaaggctaatttagtcccccattatcagctaacaatgggcttagcagaccgattaactggcggtcgcgtccttatcataaccggtgattcgcaaatcattcaacaactcagcatttgcgaagaacaggagactactttacaacgtgcaaggtggttattaacccataaagctttattaaccctctttctcagttatcttctggctgaaaaagagattacggtcaattcatttttcccagggaatgtcaccgatgagctaccgcgttattcccaaacattgctgcatactgaagtgccagttggaaaatacttagcactccatcccgatctaacgcagagcaccggtaatttttttgataatgatcgcaacttggtgttactcaatgctcggcaatacaactatgataatgccgaaaagcatttgttacagtatttaacagagtaattgagactataaaatcgcttatcattagtggcaacatgagaatattattttccactaaactaaaaaaggacctgagacagtttttgtctcaggtccttacttatttgattgtataaaaaaaccccgcggatgcggggcacaaatattaaagtttaacgatgtttgttgcttgaggaccgcggtcgctgtcttcaacatcaaatgatactgcttggccttcgtctaatgacttgtaaccgtcaccttggatagctgagaagtgagcaaatacgtctttgccgtcttcaccagtgataaaaccaaaacctttgtctgcgttaaaccattttactgtgccgttgttcataataatttcctcctgatacatatcaatgtacgttttttgttgcaataaattattgataggtaaaagaggaaggtattgtgcatccaaaactcaaattacgtttcaaaatttgattacttgaacagtatagcatggcattttctaattagcaacccgcatcccaaaactatcgactaaatcgctcgcaattcattcgcaaaaggctattaaaataggctttaaagcgcataaactttttatttaaatatttaatttctaatcattttcgaaccgttttgtaaactttgcctcgctaagtgccatcaattcctcaggctcaatttcatatttcgaacagataatgagcagttgatcgaagcaatcggctaactcctcttttaagttagctcgcttttcagcgtcgtttttaactttttcacctgggtgatcacgcccaagttcaatcgttctaacggcccgtgataattccccaagttcttcactcaagaagttcaaccgaattaatggtgaaaatcgataccaattccgttgttgataaaaatcaactaaccatgtttgatgcgcttttaaataatcttgcattttacattcactccatcattaaaaaaacacctaacctcgcaagcaatgtgcgaaattagatgtctccaagaattattgaatgtcacaggcgagattcgaactcgcgacctacggtttagaagaccgttgctctatccagctgagctactatgacctcattgattgacggtttttgctgtcagaataccacacaacatgctatattataagcaattgaagtagtcactgtcaattaaaattcgcagaaatgagggaaaaacatgcaattaaatcagttttcacgcttaactaaatctcaatctgaacaaatcacggaattacagcgtattcatttactcccaaaggatttcacccagctccccttccaagtccttgcccaagatatttttcaacggctgttcccagaagcacatagtcaatcaacccagagcgggcaacttagtttattacaagccacaaccgaattaaatctaaccgcctaccttgaaaccattgatacttcattcgatcaagttgtcttctataatgtcgccctccaactcttgggttttgaaatgacaaccgattttgaacttgatcaacccactgcttttatgaccgccacaaaactcccatttatcgatcaagcggcatttgatcagaccgctttcatcgaagccctttatctcctattaacgacgcgtagccaaactgggttactttatctggatcaattggctaaccgtggtttttttgcagactggcaaagtgatcagccccaatttctcatcttcaatggtaaggtacaacccgttttcgataccagccatttaattcgagaagtcgtttatgttgaatcgagcctagatactgatcaagacggccaacgcgacttattagaaacgactatcttcagaccacgcgaaactgaagcgggcttaaaaattccggcactctacactgccagtccttactataaggggattaacgacgtcgatgctgatttgcacaatgttgatactacaattgcgactaaacccgttcaacaaccaaacttagctgatttaacccaaacgccaaccactgcaccgcttcctcaacctcgcgccgttaatggcacaagtatgacaactgaattaaacgcaacagatgacagcaattacagtttaaatgattactttctggcgcgcggatttgcgaacgtttacgctggcggcattggcacacgcggttccgacggcgtccggacttgtggctcacctgaagaaacagcttcaaccacggctatcatcgagtggttagccggtaatcgacgagctttcaccaaccgcaccgatggcattgaaattaaagcttggtggtgtaatcaccaagttgcaatgactggtaaatcctaccttggtactttagccactgctgctgcaacaactggcgttgaaggtctgagaaccattgtagctgaagccgccatttccagttggtacgattactaccgcgaaaatggcttagtggtcgccccaattgattgtcagggtgaagatgccgatgtcttagcgaagttgtgccaaacccgccaaaaagatgccgctgatcatgcgctctctggcactttcttcgccgaccaactcaaagccctgcaagaaggtcaagatcgcatcacaggcaattacaatgccttctgggcagcccgtaactatcgtgacaatctcgccaacctgaattgcgatgtcatcttagtccacggattaaatgattggaacgttaaactacaaaatgccggcgccttgtgggatttattgcgcgatcaaccggttaataagaagcttttcttacaccaaggtgaacatatctatatgaataacattcagtcgatcgatttcaccgatatgatgaacttatggttcacgcatcaattactcggcgttgagaatcaggctgtcacaaaattaccggctgttacaattcaagacaacgcacaagaagccacttggacgacccaggcggattggctagccctcgacaatccaactacgactttctggctaaacgaacaaacattaagcactaatgctaccgaaaatgccccactgacgacttttaaagatgacggtgttgcggcctttagagcccaaaaaatcagtacagccgcttggcaagatgccttaatcgcagatcaatcaagtttcactggcaaccggttgcgtttcttaggctccccgcttaccgaaccgctcattattgatggtcgaattcagttcagaacaagggtcgctgtcaatgccgaacgtgggctattgagcgtgctggttattgactatggtcaattcaaccgtttaggcaccacacctgctgtattagctgctaaaggccaacaactcggctatcagtggcgctatgatgatttaaaggaatttaagctcaatcgaccaagcaattatcaagtcatcactaaaggacacatcaatctccaaaatcgccacaatagttatcaaaccgacgccgtcaccccaaacgaattctatgatatcacgctcgacctacaacccacccattatgatttaacagcgggacatcaactcggtctattagtctacgcgactgatatgggaatgacgattcgtgaagagcaagcattcgtttaccaagtcgacttggctgctagccaactgattgtcccccatctaaatgattaataaggagtctttttataatgtcaaatctcatcacctgtcgtcaaaccctctccatcagtaaccatcgcgtcttcgtcaatgatttgaacgaacatgaaacggtctatggcggacgcttgcttgaactcttggatggttcggcgtccatttcagctagccgcttagcgcgcgtcgaaaccgtcaccgccagcatcgaccaactgaacttcattgaaccattcaaaatgcaagattccttgtgcatcgaaagttacgttgccggtgtcggcacccgttccattgaaatctttactaagattatcggtgaacatctcaagaccggcgaacgattcctcgggctaactgccttcttaacctttgtcacaatggaaaaaggtccggcccttcctaacattcaacccgaatcaccggaagaacggttcatctgtgccggttatgaggaacgaaaagcccaccgtctcgcaaattttcaaagtcaaaaacatttcaatcaaaatatcagtaccgattatccatggaacggtcaataacgaacaaaagaggtgtcgattatcatcatcggcacctctttttatttatcttaaaagttaaacgtccggctccattcatgtgtgccacgatattggaatggttggcttttaaaacccgccatcccaaaactaacggtcattaaaataattcccacaagaatcatacataaactaatcttcaaccaatttttcaacatctacgccaccacctttaatcgactacggaacatcccaactagccagcgtgtgattccaaccgagaaacgaattaagtatttcgtcatgtaccaggtcgcccctgcacaaatcagccccacaccaaccatcacaaaactaattccaagctgcatcaccgcaattatccagccttcttgtaagccaacaaagaacgataaaactaagctgacactcccaccaagaatgccggcagcagcaaagattgcccccagaaacgggcctaaccaaatcaagaaataaccaagtgccactaatatgatggcggtcaataacaacgtgccccataacggtgaccctaagactaacaagatactgattaaaataatcaacatcggtgccatcttcttttggcgaaccggtttatctggtgtagctaattgcgctacaatctgagctggcgttgctaaactcgcgataatctccgcttccgtttcacccgcttccagtcgatcatcgattaattcatcgtaataatcaatcgtgttggctgcatcactaatcccataccgcgttaattctgccgcaagctgtttaataaattgattcttagtcattgttacactcccttatgtaagtataaatgcccatcactgccggccaatcggccaaaaaactatcaatcgatgcttgtcccgccaatgttaaatggaaatatttacgcaagcgtccattatgttcgacccgataactttcaatttcaccctgcgcctcgagccgtttcaagattgggtataatgttgagtccgaaatttcaacgacactcgatgtatctttgataatttggtagccatatgaatcctctttcttaagcgttgctaacacacaaaattccaagaggcctttctttaattgtggattcaaaccgatcaccctttcgaaatttaatactgtattatgcatagtattatgtcaagcataaaaaaagaacggtcatcagttttacctgataaccgttcttttgaaacgtttgataacagtcatatcccgactgttatcaaacccttaatctctgccgccgccaaaaatttgaagcattgtgaggaataagttaacaaagtctaagtacaaggttaatgcgcccataacagctaaaccagaaaccgaaatttcaccagttgcgccgtattgacggtacatcatacttaacttttgattgtcccatgctgttaaaatgataaaaataattaacatagcgtatgacaagaagtagctaattgcagctgatgccatgaagaagttaaccaatgagacaataatcacaccgattaatcccatcattgcaaacttgccaaagccgcttaagttattctttgtcatgcgaccataaatcgacattgcaatgaacactaaagcacttgatgcgaaagctgccccaatttcaccaatgttatacaccagtaaaacggccgtaaacgtcaatccattcaacgccgcatatgccacaaacatggctaacgaggccgttggattcttcattgaacgccgactaatctgaacgactaaaattaattctgcaatcatcaagccccaaaccatccacgagctaccacttgataggattgtgtaagtttgtgctttaaacacagtcaccattaaaacagcaatcagtgctgaaattccgacaccgacagccatcaaaccatacactttactgaaaaagcgggcttcgctgtcgacattcacaacgcgtctttcttccatgaatattcacctcttatatttctaaacgggcctataatcacccggttaggaatattgtaacaaatccatccagaaagacaatcaaaatgcctaaatcttaattatctttaggacttaaattactcaataattcttcgtaagcatattcgtatttttgcacatcaccagcgcccatgaagacaacgactggttggtcgaagtctaatagcggtgacatattgtctaatttcaagacgcggccacctttagtgattttcgcacctaagtcagcacttgaaacctttcctgctttttcacgcactgaactaaagatatccgttaagaagacttcatccgcaaggtttaagcttgctgcaaaatcatccattaacgcaattgtccgtgtgaacgtatggggttggaaaaccgctacaatttgtttgtctggatatttttgccgtgcagcatccaatgtggctttaatttctgatggatggtgcgcgtaatcatcaatgattgtcacgtcagcaactttcttttctgtaaagcggcgtttaacacccttgaagtctgccaattcgcgtgccacttctttgccatcaattttttctaaatgactgacagcaattacggctaaactgtttaagacattgtgttcaccgtaaagtgggacgtggtaatggccgatgttttcgccatgatagtaagcatcgaattctgaaccttgcaccgtccgttggatgttgcgggcttggaagtcatcgtcttcgcgtgtcccataataataaacgggcacattagctttgattttccgtaattcaggatcatcaccccaagcaaaaatccctttttgaactttgtaagcttctgattggaacgcgtcaaacacatcatctaagcctgtgtaataatcagggtgatcaaagtcgatattcgtcatgattaaataatctggtgaataagctaggaaatgacggcgatattcatccgcttcaaatgcgaagaattgcgcatctttaatccctttacctgtcccgtcaccgactaagtaactcgtcttagccacaccacttaaaacgtgagctaataagccactcgtacttgttttaccatgcgcaccggccacgccgatacttgtatagcctttcaataattcacctaagaattggtgataacgaacgactggcaagcccatttcaagggccgttttaatttcaatttggtcatcttggaaagcattcccggcaatcaccgttaagccttcgtgtaaattagtttctgagaatggcagaattttgattcctgctcgttctaaatcgcgttgtgtaaacgtatattgatcgatatctgagccttgtacttgatagcctaggtcgtttaaaacaagtgcaagagcactcattcctgaacctttaatcccaacaaaatggtaaactgtgtcatttgttatcatcttttaaacgtcctcttttcaataaatcacaattatctatatgattaaactaatcccttatagtttaccataatgcgggtttgagctaaataatgaatgtttatttttctctgttatcaattgattgatctctaaaacgcaaaaaaagcagccacaaaaattaattttgtggctgcacttaaacggattctataggtcacactctagcctaatgctaaataatcttcgacattttggaagtagactttataccatgttaagaaggtaaagatggtccagatcttccgacggccgttaatgcgttgttctttattggcatctaacaaggccaataacttatcttgatcaaagaattctgcaacgaaatcttcgctaaagagtgctttgactttttcataatacttgtcatcttctaaccattgcttaattggcactgggaaacctaacttaggacggttggcccaagctgttggcaaatgtttagcagaagcttgacgataagcgtatttcgtatcatgactattaattaagtatttagttgggacttcaccagcggccttagccaccttaggatccaggaatggcacgcgtaattctaagctgtgcgccattgaaatcttatcagccttttgcaaaatatcgtttaacatgaagtgatgtaagtcgatatattgcatttgtgagactggatcagcatccgcaacgttatcaaaatcagcttgatagtttgcttgaatcgttccatcattttgataagcgggtttcaagaaagtattggcttcatctgccccaaaaatacttggattttcgatatcaaaaatcacagattgacccgtatagaattcacgcgggttcgccaaattcgtgtataaatggacgcgacctgggaaggctggcatcttcttaacggctttggctaaactggcacgcgcacccttaggtaatttcttcaagccagaagtgaaggccttaattgttgaattgtgggaatgcatgccgtagttgacatacccagcgaataattcgtcggccccttcaccagacaaggcaaccgttactttttcacgggcaaagcgtgacaagaaccataatggcacacatgatgggttcccatctggttcgtccaagtaatattggattttgtcaaattcagcaaacgcatcatcggcattcactttggtttcattgaagttcaagcctaattcatcggcaagcgcccgggctgctgtgacttcattataggtttgatcatcaaacccaacactgaagacttcttgcggttgcaaaatacttgtgacataactactgtcgaccccttctgataagaaagctccaactggtacgtcagccacattatgggctttaacggattcttcgactgcagcatcaatcttagccacttcttcttcgaaagataagtttgaaggattaaatgacatatcccaatatttttcgatgtccaattggccatcttgataagtgaaataatggcctgctgggaatctgaaaacacccttgaagaacgtttcttgtaaatcattgtattgattcatcatgaatgattttaaggctgtcttatttagttctggtttgaattctggatggcgcatgaaagttttaatttcactactgaacatgaaagtcccatctgctaaagtcgtgtaataaaggggcttaatgccgaagaaatcacgagcaccaaataattgcttagtttgtaagtcatagatgacaaagacaaacatcccacgcaattttgtaacaacctctttaccccattcttcgtaagcatgcaaaatggtttcagtatctgaatctgttttaaagtcgtgaccaagtgcgatcaattcagtccgcatttcacgataattataaatttcaccattgaaaaagactagcttagtgtggtcttcattataaatgggttgatcaccctttgctaaatcaatgattgataaacgccgaaagcctaatgcgactttatcatcgataaaatcaccatcaccacttggtccacggtgtttaatgacgtccatttgttggttcaatacttcttttttctttggtaaatcaaataatccaccagcaaatccgacaatcccacacatatgtttaacccctcttttgtgttttactgcttaattgactgcaaaatgaaataacaattaaagggtttgtctttaaccaattaattgctatctattatcatactattttaattttaataatcccataataaaatcgtaagatggattattttagtagggctgcgactgcatctgctgtcacttcacgaccgacttcccaatcatctggcaagaccataatccctttagcaggagcaccagcaacaccgatttcacgggctgcacagatcatgccgtcactttgaacaccgcggagttgaccaggccagataattttaccttctggcatgacagcacccactgttgccacaattactttttgtccttgtgcgatattggcagcaccacaaacgatttgaacggtttgatcaggtgcaatctgtgtttgagtaacgtgcatatggtctgaatcaggatgcacatcacattcttggacataaccaacgacaatgtgtggtgtttcatcagccactaaatcaccggtgaaaccagctgctacaagtgcttcatttaaaacagcaacttgctgttcagttagtgtttgaacaccgttgaattgtaaatcgggcaataactcattcaccgctaagaaattatagccgatggtttgacctgcctgatcactaatccgtacgattgattgtttttcagttgtcacttgcttttcaacatcaggttgggtcattaccactaagatgttgggaaaagccgcttggttcatacttgcaattaacatttaatgactccttcaaggttagttcaatgagtgaataaatccagtaatttcgcgttttgttttccgatctttattgacaaaacggccgatttctttaccgttatcaatcacaacaaagctaggaatcccaaagatttcccattcttcacaaatatcgataaattggtcccgatcgatttcaataaagtcgtattccgggaattcagcttcaatttctggcatggctggtttaataaaccgacaatcactacaccaagttgctgtaaaaaataaaacatgtttcccttcagtaatcagatgagtcagattcgtatctgtcatcgctgctaattctttcattatgcaccccttcaattttactactcgttttaatataagcggtttgtccgtaaatgtccactccttaggaccaaaaattatgctatactatttaaagacaaaaacgactgaggagtttttctttgaaaaaaaatgggcaaacgtttaaatatttattaaccggcatcggttttgcgctggcggcggctgccagtgcgaagcaatatcgggcgcaacaaagaatgatcaaattaaaccaaattttagaagatgttaaagccggcttaaaacatgaaggccagattgtgggttcttggattgaagaaagtccccacttattctcacaaaacaaacggacctttccagtctatcaaggtggcatcatctgcgagcgtgaagatggtacaaaccaatttcgattcaaggtagacgcaagaaccggcgtcgtgattgaattctcacaaatttagagtgcgcagcgcggtgggcacgttctgaggattagcttagtcagacgagtgaccaatttattggtcgcttgactgacgttgctaaccgcaggaacataccgcgcggagcacgtttcaaccaatattataattaaaaaggtacgctatcctagataaaatctggataacgtacctttttgagttgaaacgtgctttatcacactgtcttttccggttagctacagaaaggaatcgatggtaaagaacccccatcaatccctttcttaggctaatcctcaaaggcaacccgtgtgataaaaacactcttgctgaaacgtgctattgacgctagatttctgcgcctaactacacctgtcaaattagcgattacatcactcattcgccagcctatgttagtgctcaaaatctgaccgagcgtcaagagcactcttatctaaaacgtgctttcaaagctagcaccctgtgcatagctacgtccggcaaacaaccaattgcattggttattcaccagactaggctattgctcgggtgctgaccagctttgaaagcactctacttgtagtgtgcctctaatctgtaaatcacttggccgcgcttgctgaatttttcttcgtattccgtttggatgttgtcttctgcaagttcactattgtgtaaatcgagtgagatgtcgtcaaaaaccatcccataatcattcaggctcatcaatgagtattcgaatagaccttggttatcagtcttaaaacgtaagtagcccgttggttgcataatttgttggtattccgctaagaatgatttatatgtcaatcggcgcttttcatggcgcgtcttaggccatggatcagagaagtttaagtacacccctgccacttcgttttcagcaaagaaagttgttaaggctgcgccgttacccaataataattggagatttggcaatttcaattcaacttgtttttgtaaaataacggcaatcgctgattcttggatttcaactgcgataaagttccggtctggatatttttgtgccatctgagtgataaattggcctttacctgaacccacttcgatgtaaatgggttgttctttggcaaaacgtgtttgccacttgccggcgatatcttccggactcactaaaatcatgctggggttggccgcaattaagtccgccgcccaaggtttatttcttaaacgcattatgttctccttgttgatgccaatcaaaaaggttggacacttgcccaacctttggcatttaatttttattaattatttcagaaatcactgcttctaagcgcaatatgtcacggttcatttcagtaaaacgaccacgttgataatggtgcttaatactttggagtaggttcaaactgccgtaccagttgacgcgcatcattaattcaggcgtcacctctaggccgtagttctcaagccactcgtgccattcttgacgtggaacatattgaaataaaatcattccgaaatcgactgcagggtcggctaacattgccgagtcccaatccactaagtagagtcgattaatatccgataacaaccaattcttatggcttaaatcgccatggcacacctctgcagaaggtgcttgtaattgacgtaacgtttgcttcaaataatcagctgtttgttctaaaaatgggtgttgccgtaaatcttgcggtaagtcgtaaaaataggcttgcaacatttcgtttgctgaccagacacgaccgccaactttttgtaacattcgtttcaatagttgggattgatgcacccgtgctaataacttagcgacttgtgggctattcatctcatcacgtttcaaggttcggccgttgagccactcttgtgcggttaagacatccccactcgaaatccgcttcgtccagattaagcgtggtgttatgccttctgccgagagcgccgctaaaaatggtgatgtgttgcgctttaggaaaatcttttctgacgcgcgaacgcctaaaaatgcagcgcccgtatcaccaccggccggacgaacttgccagccagtatccaggtcaaaattcatcagcctcgactcctcttcaataaaataaagcgccaaaatacagcgctcacgttgcttcaactgtctaataactaagggtatcatataataattagccagtagtcgtcaagtaggaaagcatgcgtgtcacagggactatgcccccaaccgtttaggcaaatagaattgaacaaagccaatcacgagcacgaacaatgctaaaacacttaaaccaacttgaatcgtcatccctagtgtcactaataaaatgacactaaagagtaacgcctgaagcaataataaagtccgcattaattggctgaatgcttgaatccgtttggtcgttgatactgggtatagatgagtgaaaataatttgatcatactgattgtaaaacggtaataattgaaaaccaactagataaatcaatagaagtccgagtgccaaactcaaccaccatatgtgactgaagcacagaatgatgccccctaaaacaactaaccggatatataacccgctgaattctgtgccccgcaaaaagccacgcgcatataaatagaggtaagtattggctggtttagctgtaattggctttaataagccatctaaatagcgacgacgcttaacctgactactgagccctggcacatccgtgaagaggttatagaggcggtaaattcgtcccattcgtgaatcttctgcaccaactgccgctaaccaatcgaatagctgtgtcttttgaacacgcgccaattgttgtcgctgataataggctagtccaagcgctacaagcactccgactaaatttagccactgatataattgactggcaattattgccaaatcaaggattaacgaaagccctttcgttgcctgggtttcatccgcttggtaccactgacgcaactggattgaaaagcggcggtctttgatgattaccaatgtaatcaaggcaacggctatgtgccatgccgggaccgtcttagtaattaacaagagtggcgccactagaagcgtcacaaaagccattgcaattaatggtaaccagctactatataaacgtgctgatttcaaatacgtcacaaggccactttcttttggcaataagaagacactatccgcttcttttaataatgttgctaggcgaccaaaactaactgccgcaagtaatactaaactcaatacaggttttagccaccaagcttgtggatccagtcctttgacggcgttagcatatgtgtagcccaacgctcctaataaaaagataatcgcaatcacgaaatgatcattgaaaacgaggcgcaaatacttcacttgttcttgaatatgtttttgcacgcgtttttgccataatgcttgcatggttaaccttctttcgtcatctgcagataaatatcgtcgagatcggcgtcagccatgttaaattcaatctttaattcttcaagcgtgccagtcgttcgtacgcgaccctgatttaaaagcacaaatgaatcagcatattgttgcgccgttgcgagaatatgggtcgacattagaattgcagctccttgtgcttttttttcagcaatgatttctaataaatcatgaattgccaatggatccaatccagtaaaaggttcatcgatgataaacaagtcagcattcgtcataaatgcattgacgatcattactttttgccgcatcccttttgaaaagtgaaccgggaaccagtctaacttattgtctaatcggaatcgttttaacaatgcattggctttaacccacgtctcttcaacgtttaaatcataagccatcattgttaattctaaatgctcctttaaagtcaattcagggtataagacaggcgtttctggcacataggctactttttggcggtattggtcaggattcgactgtaacgtcacaccgtctaaagtaattgtgcctttttgtggtgtcaataatccaatgatgtgtttaatagttgttgatttgccggccccatttaaaccgattaaaccaaccacttgattgtttggcacagtaaagctgacctcttttaaaacggggacgtgcgcgtagccccccgttaattggttaatctctaaactcataatcaatagcctcgttttttggtttttaaaactacttttttagtgaatcctttttcatatcatatcttaacacgaagtaaactgcgagtgtatgcccccactcaatatttttccatccgcttacaaagctgatggcagtagcgaaaagcccttgtttatgatagcattaagctgtattgagacttcaaataagagaaagtaggcataattaatggatgattgtatcttttgcaaaatcgttcgaaatgaaattccgaacacagtggtctatgaagacgacgatgtcaaagccttcttggacatcacacaagtgacacccggccataccttgttggtacccaaaaaacacgtggcggacatctttgaatacgatgctgatttagctgcggccgttttcagtcgcattccaaagattgctaaggctattaaagctagcaatccagccatccaaggaatgaacatctgcaataataacggtgcggtggcttatcaatccgtttttcattctcatattcatcttattccacgttacacagcggatgattcatttgcaatgcaattcggtgataatagcgctgattacactgctgaccaactacaagcgatcgcagatggtattcacgcacaattggaggactaatcatgtcattttcaaaaggattactagttggtggcttattagggacggcttatgcccttctcactgcttctacaaccggccccaaacgacaacaagcgattgcccgctatttaaacgagctctcagaaagttcaactgatgttcaacaaagtgctgttcaattgcaaacagcttcgcaaaatttatcaaatgaactcaaaacaactgcagtcacatcacttggtggtatcagtgatgcattgcaaacattttcatttgaagcagcaccacgaattgctcaaatcgaagaatcagttgatcgtttgacacaaaacttaaaaaaataaattcaccaaaaattagattgtatgcaagcgataaggttaagcatgtcaacgattcccgcgtttttagcgtaaaacctaaatttgaaagttctgtgaagttttagacgcttcgttcaatttagttagtttatgtgttatattaattggtgaattcactacgaatttattcataaatattttgataaggatgtgtcatacaatgaagaaatggctattagccgctgctagtttattaatggtagtttcactagcaggttgtggtagcaagactatcgcaagcctaaagggtggtaaaatcactcaagacgaatactataaagaaatcaaggaaacatctgccggcaagcaacaattgcaacaaatgatcttgcaaaaagcgcttgaaaaccaatacggctcaaaagccatcgataaaaaagttaagaaaacttatgatggttacaaaaaacaatacggttcatcattcaactctgtgcttgcacaaagcagtatgacacctacatcatttaagaacagcatcaaaacacaatacttaacacaagcagcactaaaagataacaaaaaagtaaccaatgctgacttgaagaaacaatggaaatcatacgaaccaaaagtccaagttcaacatatcttagttgaaaagaaagaaacagctcaagaagtcattgatgcacttgcaaaagacaactcaacaaagaacttcaacgaattagctaagaaatattcaactgatactggtacaaagaaagatggcggtaaattacctgtcttcgatagtactgatacatcacttgactcaacattcaagactgctgctttcaaattaaagacaaacgaatacacaacaacccctgttaagacaacttatggttaccacgttatccggatgatcaagaaccctggtaaaggtaagatggctgatcacaagaaagaattaacagacatcgtttacgcttcatggcttaaagaccaaacagtgatgaacaaagtcatcactaaggtacttaagaacgctaacgtatctatcaaggacaaagatttatcagacatcctttcaagctacggcgttaacagcaaagcttcaaaatcatcatctaaataagcattaacaaaaagacccccgctgcgacagcagctgcgataatccctttatggttgtcagatgaaatacaataattcatctgacgactatggagggatttttgtatgcccagatctaaacatacggtactcgagaaattaacaatcttagatgaactgacccaatcaaaaattggactgggtccggtggccaatcgccatggcattgatcgtaagacgctagagcgttggcgagatcgatactcccgtgatggaattaatggtctaaaggaggctaagaaaaacaaacactattcgaaggaactcaagctcaaagtagtccacgcatatcttataggcgaaggcacctttgatgaacttgcaaataagtttggacttcgtggatcgcagcaagtcgtagactgggtaaacaagtataatgggaataaacctttgacggcgtcgccgtccagaaagcaggttcccactatgagccgtaaaacaaccttggaagaacgcattgaaattgtcgagtatgtcaccaagctgaatcattcatacacagaggccgctgaacgcttccaagtctcttatcaacaagcacgttcatgggtgatcaaggccaatcacggcggctatgaggcgctcgtggacaaccgtggccatcacaaagaacaagctgagctgactgaactcgataaagccaatcttgaaatcaggcagctcaaagcacagctcgcagacaaagagcttgtggaggcattcgcaaaaaaattgctggaaatccagcgcagggggtgagtaaacaacatcgactgtcttacttcgcaattaatgaggtcagtcaaggcaagcgtggtgcaatatctacgctgttggccgttgtcggtgtaagccggcaggcttactacaaagggttaaatcgagaagaaacagcttgggaagcccgtaatcgtcagctcaaggaacggacacaatactggtttgattttcatcatcaaggtatcggtgctgggaaccttttattgaatcttcaacatgatgacctaattgacttccccgttactttcaggatggtacgtcgtgtgatgcgggagctcagcttgacatgtcaaattcgggtcaagaagcacagtcgacataaggagaacgaacagcacattcaagacaatgtgctcaatcagaacttcgacgtcgacagtcctaatcaggtctggttgtccgattcaacggaactgacttacggcgtaaataataagtataaggtgcgcttgagtggcgtccttgatctctacggccgacgtttgttgtcctacaatttgagcactactgaaacgtcagcagcagaaatcgaggttttccaacgagcctttgaggcttctggcgacgtccacccattggttcacactgatcgaggatcagcctacacctctggtgccttcaacaactttcttggtcgttacaacgtcacacgtagtatgtctcgaccaggaacaccatacgacaacgcaccgatggagcgctggtggaacgaattcaagttacggtggatggctcgccatccactagcaaagacttgcgaagcgcttgtaagactggttgaggaaggaatcgaatatttcaatcaccacaaccgctcagcacaaagaaacggcctcaccccagatgaatactggagtgaagccgcatagagacagattcaactttatattatttcatttgtcaacttgacagggcctagtgcaagcgggggtctttttgtacatttattctgttggttgatctaaattaggatcttcgactgggcgatagaaacgccgcccatccattgcgaagagccgttcagtaaactgacctgcttccgcatgttgtaatgactgggtcatcatcgtgatacttgcatctaattcatcaatttgatgcagaacttctgcttcaagaacttgtggccggacaggtgaaccatattccattaaaccatgatgggccaagataacatgccgtaatagcaacatatcctcagcattcacgtcgatctttaatgtatcacaagcccgcactatctcttcatcaaccagtacaatatgaccgatcaaattgccacgaaccgtgtattccgttgaaacaggaccggacaattctagcgttttacctaaatcatgcaagataacaccagcatatagcaatgcctcatcaatttgtggatattgggcagcaatcgtcttagctaagcgcaacattgaaagtgtatgataggccaagccgccactaaacgcgtggtggttggtcttagccgctggaaaactgaagaattccgcttgatgtttttgcattaaatgtcggaccagacgttgccaatttgggtttgtaatctcgaataacatcgcaccaaattcatcttgcatctcggttacttgcaccggtgctttaggaataaactggtcaactgtttgcggttcgtcccccgtcgttaagcgcagtttataaatcttaacttgcggattattttggtataattcccgcttaccttgtaaatgaatcacctgacccgccgtaaatttagcaacgtcttcatcagaagcatcccagtatttaccaccgatttgtcccgattgatcttggaacgtaaacgcgatgaattgcttgccgtttttagcaatccgcacgtccgccgttttaattagtacaaataaatccagattctcgtcgttttggtaatcaaataatttctttgctgtcatgtgtcagccccacttcctctagatttaaccaatgatccgcttcaaagtgtgcttgcgtccgcggattggccgttaaataaatcacttggttggccgcactgagtcgttggagtaatgtccaaacggcgatttggcgttgatcatcaaagttgacgaatccatcatccaccaataaaggtaatgagactacgtcagctacctcttctgcaaacgcaaagcgtagtgcaatgtataactgctctgcagtcccctgtgataattcaccgacttcaaaaagcacttgatccgcccgtaaaaccgtcatcagtgtgtcatcgaagttaatcttaatataccgattctgggttagaattgcaaaatactgcgttgccttttccaataaacgggggaaccgttcttgtgaagcggccttcagcgtcgcttgaatccaatcaattgctaactgcttagcgagccactcttgggctaaatcagtaatcttagcctgttcttgtaattgtcgctgtcgctgttgttgataactgtcattatcgacaagttgcgcttgcgtcacgcgtagttgcgcaacagcttgttgctgttcttgtaactgacttgtcaaacttgccacttgttctgtaatttgagcggcttgttgcttaagctgttcttgactagcgattgcttgtaaagccgacaagtccgttgccaattcgcgttttaaatcagcttgacgttgttcattagcacggcgctgttgctcattagcaacacaactggctaattctgcggcggttgttaagttagcctttgctagtaatgctgtttgtgcagcgtcttgttctttaatcgtgtctgttaagcgtgtcacttgttgttgataataccggtaactctcgtttctttgtgcaaggtcttgtgtgagttgggtaatccgggctttgaattggctcacctgggacaagttctcttcatgactgccctgtaacgcccccacccaatcacgggcaaaagcaaacgcatcccaatacatatttagtgccgcttcgattgcttgattttcggcttgttgttgtttgagcgccatggtcaattgagtcatctggcttaaagcatgctgcatcgctaaaacttgactgattggcatcgccgtttcgtagccagtttgcgccaataataccgcgctttgttcgtgcatcgtctgcaatattgcttgttgtgcttgtaaggcagctgtcttggtttgcttttcagcctgcaacacatccaacttagcgagcgcttgttgccaagcttgtttttgcactggttggtcatggtcagattgtttattttgccacatcatgtaaccaccatagccaagtgcggctagtccaacgaccgcaatgactttcagagcgcccggcaagaaaagaccaatcatgaatatgactacgccaatcagcatactcaattgactggcacgtccatcagtcgttggcgtttcttgtggttcaacctgactaactgccgcgttttgcgtggctaattgcgcctctaaatcagccagttgcttggtcagcacttgactggtcgtggttgccccattcatttcagcttcggcttgttctagttgtgcgcgttgctcatctgtcaaaggatttggtagttgatccgtttgccattgatactgcgctgctaattgggctttttcgctagcgagttgtgcgctttggttttgccgtaatccaagtaattgaatttgtttttgctgttcatttaattgttcaaacaatggcaccaacgtctcttgattagcttgataaaatcgaaattcacctgtttgatccaatgtttcttgaacagttgctacctcggattttgcttctgctaacgcctttgcattgcgttctcgttcgaccactaatgcttggtattgttcgtcaatcgttaagtcaaacggcgttgccttttcaagtttagtttgaagtgcttgccattccgcataacttggccaacgatcaagcaaatgttgcaactgcgcttggcgttgttttaattcagccacttgcttttggtgttccgtcattgtcgcaacggtactctgcaatagacgtgcgttcgtttcatattcttgataaccacgactagcttcgttaacggattgcactaactctggataattcttcaaagcaacattcaatggccacttacgcccagagggtttgaaaattttctgactgtccttatccagttccttggcaaattcgagccactcatgactccccaccgcaccaatcatcaataaatgctgcaaaaaatcagcctgttttagattaaatatctgatttaaatcctgttggttcgtttcaaaaatctgcgtaaacaaagcttcatccgctggtgccaagaggtcagctaagtaatcagcgccaaattcttggccttgatcgatgaccgttacgtcgcccccaaacttaccggaaagccgccgaatcacaatatcgcgatcatgatagctaaccagtaattcaccaccgtattgcgcgccgtttttgggcacatattgttcataccgttgtttagcggtcgcaaagccgaataacacgcctttaataaaggctgtaagggttgtcttccccgcctcgttttgaccataaaggacttgatagtcggtattcaaatcaatcgtctgatcatgccacttaccgaagcccaaaatggtgactgtcttaattcgcatggctaatcccccatcttcttctcttgtagaattgtcgtgactaagtccttgagatccgcttgaaattctggtgtttcaattgcttcccggataaagttttccttcattaacggctttgctttttccagaatattgtccggtgtcaagatagcttcagccgcttggtcccagtaggcttggtcaatctgactaaattgctgttgtgctgcaaaccgcaacttcaacgcgtatggccaatgcagtggttcactattttccaattggtcttgtaagactgccaataattcaccattattaatccgttgcaataagtcactcgataatcgctccgcgtgtgttagctctagcgccactaaactagcatgatcactttgcatcaattgggcactcaaagccgtttgcaattgagttaagctcatgtcaggtgtcacctcaaactgttgacgttgccactcaatgaccgtcgttggtttgaacgttaaatcgaactgaccatctttggtgtccactaaataaaagcctttttcaccaggttcattcttatgccgcccttgtaagttccctgggtaaacaatcgctggtcgttcttggagaatctggcgcttatgaatgtgacctaatgcccaataatcgtaatggcaagcgttcaattcactaatcgtaaatggtgcgtagtgatctgtatcggccgttgctttttgactaccgtgcaacgtcccaatcgtgtaagttgtgctggcacgttgtggaaaatcaaccactcgatcagctgacaaccaccgttgatcataactgaaccctacaatggtcacactctcatgtcctttggtagtcagttcaaacgactctacttgtgctccaaaaacatggacattggcgggcaattcaaaatgcacttgattggcatcccagtaatcatgattcccgtaactcagatagaccggaatgtcgacatctgccaaacgttcaaattgttgttttaaaaatttctgaactggcaaactctgcgcttcttgatcaaatgaatcaccaactaataatacaaaatcgacggcttcatcgatggctgtctgaattaattttttaaacgccgtgaaagttgacgcatggattgtttcccacaatgctgtcggtgcttgttttaatccgacaaacggactgtcgatatgggcgtcagctgcatggataaatttcatcttgaaaaaccccattcttttggccggtcgtaaccagcttagataagcttcattataccattgccacgcggtgtgataaaggcgattagaacaaacgttctgtttttaggcaataaaaaagcggtgaatcgaaatcaatcgattcaccgtttgaaacgtgcttctggttgcaaccacttccgcttaatttaaaaatcgcgttaatcctagaacctggattaacgcgatttttgtattaatgctcagttgctgaccgcaatcagtcacactcttatttgaaacgtgctttttgaaactgacttttccagttaactacaaaataagactgatgacaaaatacgccatcagtctcatttttaggttaatcctcaaagccaaacccgtttcaaacgcattctatgcttggtagatatctgcgattggttttgagatgatttggtttaattcatccattgtttggcttaattgacgttcttgttccatcaagttcttgattgcgtcgatgtccccaattttttgagcaagttcttggatttctttaatttcgtcgtccgttaattcttgaccttgcatttgtttttgttgaagtgtcatttgttgcgtttggaatttcttaaacattgtgaaggcaatatcgtcttttttcaatgctgcaaaggcattttgtaagcctaaaaattgtggtaattcttgcaagtgcgttgccatttggttggcatcatcataaatattaactgtcattgtactgactcctttttccatgtatttaattgaaaaaacctttcaaattattataccattgattggctgtatctttcgctttatttatcccatctttaaaacccgattcaattgaatcgactaattcgttcgatgtcccactctgttcttttttcgccaacgattgagcatcttcagtatcaaagtccgtctgtgctgtggttggtaagagttgttgcatctcatatttaaagattggtgctaaaccgtcaatgctagtgttcttcataaagtgatcttgatccgtcttgtcataccccatccaagtcgcaacaacaatatccggcgtataaccgactaaccattgatctttggtcccaaagccataactatcaggcacttcagtactaccagacttccctgcgacttgatagccgttgggtttcgcataacgcccagtcccattattataaacgcccaacatcatgctagtcatttctttggctgttttttggctcataatccgtgtcttggatggttcggtattatcaacaatcacggcgccactcgcatcaacaatcttccgaataaaatgtgtttcagacaattcaccgttattcgcaaaagccgtataagcactggccatttggtaaggtgaaaccccaccttgccaaccacctagagccatcgccaagttttggtcactcttgggtactgaaatgccgaatttttcgaccgacttaatgccgcgtttgaggccgatttgatttaataaccaaaccgctggcgcatttgtactgttggctagcgcctgatacattggcatcgatccggtataaacgttatccgggttcgttggtgtatagtggttagtcccatagctttgcttcttatcttcaagtgatgaatcatagtggtagccatcttctaaggctggcgtataaaccgccaatggcttgatggttgatcccggttgacgcttcatctgtgtaatgcggctataaccacggattgtatactcaccacgaccaccaacgacggctgataccccgccggttttcggatcaattgcaactgaactaccttgaactaaggtgtcatccgcagcgttatcagggaacaaccaattttgtttaaaggtggtttccatcttactttgttgggattggtcgagggcagtatagatcttgtatccgttcttaacgaggtcttcttctttcaacccaaagcggttaatggcttcattcacaacctcatcaaagtaatacggataacgatacccatccgactgctcgtaggtattcgtcacgacaagttgctctttcttagcagcgtcggcttgtgcttgcgtcaacttgttattatcgaccatcaagccgagaattaagttccgccgcgcagtcgcattatctaaatggtcagccggattatagaaactagggctccgcaacatcgctgcaatcacggcgccttcactagcatctaattcactcgcattcttaccaaaataccgttttgacgcatcctgaacgccccacaccccgttaccgaagtaggcattattcaaatacatcgctaagatatcctgtttggaatagaccttggtaatctgaacagctaagaataattcctcaaacttccgcgagaacgtctgcttctgactcaacttggcattcttggcgagttgttgggtaatcgtactcccaccaccggtaatctgcccatgatgaatcactaacccaactgctgctcgtgctagccctttaatactgaatccatgattggtataaaaggtccgatcttcagtcgacaaaacagcattttgaatctgcggcgatatcttatcaagatcgacataagttcctttttgcgaatataacgtccccgcgcgttcatccttaatgtcataaagcgccgttggggtttgtaagttggccttaatctcaccgacgttagccgtcttcgctttaaacgtgagccagctgctcatcgcgaaaatgagaattaaaacagcgagaatcagccatctcgtcaattgtagtcgataccagacataacgaatcacgcgccagacgcgtttcataaattgtttaatcgccaaccaaaacggcgaagcttgcttgttcatgcgatccctcttcttacggtcaaaattaatcttgtttaattgtagcatattcgtcaattgacactgatgccaatcgaagacattaacaatcttttaaaatttacttttacaccaattttcgctaaactaatagcttaaaggtggttgaactctaatgataatttaccaaaaaaaagtgactttagcgcccgactttagtccgatgtctgtccgcggcctgctgaatcactggttagtgccgcaaaaaatgcaacatttcttgcggattaatcaagatattttggtcaacggacattatctcgccttcaaccgacacgttgaagctggcgatcaaattacgatgaacttctcagaagtttccgttaaggtccaagactacgaacttgatgaacggcaatctttttccgttttatacgaagatgatgatttactggtcgtcaataaaccggcggggattaaaacccatccgaacggtcctggtgaaaacttcaccctaatgaaccaagtggcggcctatcttgctaaacaagataaaaaggcctacatggtccaccgcatcgatcaagcaaccagtggcgtgctcttgattggtaaaaccccaatcgtcatcggcattttaaaccgacagcttagtcaaaaaacaatgtcgcgccaatacatcgctattgctaacgatccggaacaaacactcttggaacatgcaacgattaacctcccaattggtgtcgatccatacaataagcgcaaacgcacgattgattacatcacaggtttatccgcagtgacccattaccaattactgcatcgaaaaggacctgcagcaaccttggcagtcaacctcgaaacagggcgaacacatcaaattcgcttgcacctggcggctgatggtcatcccattttgggtgatccgttgtactttccaaccgattcaacacagcgcctactactccacgggcaaacgttgcgctacacagagcccttcacggataaacaaagaacagtaacagcccccatcccagacatttttaaccagtatgtagattaaagagtgagttatcagccggatatctcctgaggattaacacagaacatgtttagctcaacaaaataaggcgttgcgacaaaaaattacttttgtcgcaacgtcttatttgtttgcttatctcgctgttgctagatgttgtgcgaaacgttcgtttaattcggctgctagttcctcactagggctaatgataacaatcgtatcgtgacccgccagcgtcccgacaacttctgggtaccccaaatcatcgattaaggctgctaataaattcccgttacttgggagcgtcttaattacgtttaacatttgcacttgtgtaatggacaaagccacttcacgcagtttatcttttaatttctgagtttgggtgcgttcgtcatcgtgaaaaatcgtatagcggagctcaccgttcacatcccgtgccttaacgatttgcatctcccgaatatcacgtgaaatggtcgcttgcgttgcatcaatcccatcttgtttcaacgttgctaataaatcctcttgcgtcgaaacaacttgctgattaatgatttgttcgattcgtgcttggcgatctccttttttcacgactgccacccctttttaccttaattggctctattataccagtttttatcaaaattcgatagacagcgctttatataattcaaaaaagcgcatgttcataacttttttacccacaaaaaaagagcgccgattactcgtgtgcccttttaagattaagctttccgtgcttttcgtactttaaatgtggttaaaattgcgaccgcaacagcaacccctgccaaaattgagaggaagaacaaaccaatattattcgttgcacctaacaccccaacgattgggccaccatgtggcactgcatcggtgattttgaagaccatcccgactgcactagcaactgctgaaccagcaatgatacttgggaaaacttgttttgggttagctgttgcaaatggaatggcgccttcagtaatcccaatcaagcccattaagatagctggaatcccagctgatttttcttcttctgtataaagatcgcgacgaacaaatgttgcaatccccaatgccaatggtggaacagcaacggcacaagcaacagcacccatgatttgtggatgtccagccgtaatcgatgccaccccgaataagaaggccactttattaactgggccacccatatcaatcgcgaccatcgcaccaatcacaacgccaagaatcacactcgtttctggattttgtgaaagggccgttaacatatcttgtagtgccgtcatcaaccatgaaataggtgcgcctaaaacgagaattaaaacggctgagataatcccaacccctaataacggaatgacaaaaattggcatcactggccgtaaatcttttggtacgggccatgaattaaaccatttaaccaagtaaccagccgcaaaaccaacgataatcgcaccaataaatccagtcccggcttttgtaccaaggatgtctgtattgttggcgaccattgcaccgatcattgcgggtgctaaagctgcacgccccgaaatagcataagcgatataaccagcgagaattggaatcattaaggtaaaaccaatcgtcccaatctgattcatactactccaaatggtatgtggtggaatcaccattcctgctttagtcggatgcccaccaatcgcgattgacaaggcaataaacaacccaccgacaacgacaaacggaatcatatgggaaaccccatttaataattgcttaataattggactttgttcatgaccgtcctcttgtttagcttctattttcggctgattcttgccataaatgcctgccgttagtgctttttcaatcagtgtatcagaatctttaatagcttcagcggtcttcgcatatagtactggcttgccattaaaccgttcttccccatcaacggcaacgtcagcggcaataatcacgaaatcggcatcagccacatctgcggcgcttaattcatcctctacccctgaagcgccttgtgtttcaatcttaacttcatatccgcgagcttgcccggctttttgcagtttttcagctgccatataagtatgggcaatcccaactggacattttgtaatcccaacaaactttttcatcttctaaatcctcctagttaaattcgatttcatcgttaactaacgtgtagagtgccattgcatcatgccgattttgcttcaaattatgaataaaagcgtcatccatcaacttgcgcgcaaacttcgacaacacttttaaatgcgtcttattagggtcatcgagcggcataattagggcaatcgcgatttcaactggtgcgtcatctaatgcttcccaatcaacaccagtttcaaacgtgacaattccgacaactggttgagttaatcccgccactttcgcgtgtggaatcgccaccccattcccaaaaccagttgtgctctcagcttcacgcgcattgaatcccgcggttaatgcaacccgatctaacccattcttatcagcaaataattgcgctagtgttgctaatgccgtcggtttatcatccccaacaacgatatctgtaaaaatattttcaacatcaaattctttcatctggtaacactccattctaatttttctgattcaattgtgccaagatggcgatggcagccgtcccatcagatgcttgtgcgacttgctttaaaagacggggggtttcaatcaattggtctaaatcatgataaatcgcccgcatttggccatgaacagtttcgttcaaggccataaagaagacgagctgcactttgtcgttgtgttgccaattaatactttggggtgcaatcagcaacccaatggctggcttggtaattaattgtgaatccgcatgcggcaaagctactcgaccaagtgccgtacttgctaaagcttctcgggccagcgctgcctggacaaccgttggctttgcatacccttgatcaatgagccgctgaccaattaattcaattgcgccttgatccgttaactgctcttgcgtgacaattgtcagttcgggttgcaataaagctactaagtgattggtaggcgtcggttgttcagtaatcatctggcgaatgattccaatatcatgccgatttaacaaaggactgacttcaatcaccggcactgacaaacctttaatcgcaatcgtactgatgactagcgattccttaatcggggttgcaagtagttctcccaaggcaataatacgagtaatccgtaattcttgagcaaacgttttggccaaccgttgccctaataattgcgatgtcccaatgccactactacaaaccaccacaacactcaagcgtgcatcttctgaatgtcgttcaaaaaaagcttcaaagtgtaaactaataaaggctaattcgtcctcattcatttgaatctgatactgattttcaagcaccggctttagtaacactgcttgatcaaaggcttgcggaaaattctggcaaatttcatcagtatatgggttattaatactcaatcccattgcaagccggcgaagtgccgaacttaaatgaaccgctaacccctgaattaattcctcatcaactgctaattgagcaagctgttgccgtaatagttgtggcagcccgactgattaccgcaactcggtctggatagtttgaacagatgtatccttcgattggaccgttactaaatgacggttgagatattcctgttcaaaatccggaattgtcaattcaaatcgccgttctaaaatctgtactaacagctgtgtttcggcaatgaacggtgtcaccactggttgggctccattgcttccaccagttggtgctggcatcatcagatgaatcgctaacgactgaaactcgtaatcagtaaatgatagcgtacttttttcaattaattccgttaaagctgtgagtatgtttttaatcaaggctggttcaaacagttgattcagattatccggtaattgaacatggcgcactaactgtccatttaactctttagcctcagtccgttttccccaatactgactgattaactccaccgttgcttgccgcttttgatgctcagaaccgattaaggataaaccggtatgcgtgattgccaattgaagaccgaattgcgcgagtttttgctttacctttttcaaatcattctcgactgtactccgactcacgtatagggtattagaaagttgttgaatcgtaatcgatgctgaacctaataataatttagccagaatgcaatgacagcgttcttccttggattggggacgatcattggcctttttttcaagatgattggctaatgtcgcgacatccccggtaaaataaataccgtcattcggttttcgaacgagtttcacattaaagggctctttcgatatcattcaaggtggttgcaatggtgcgctctgaaagctgtaactgtgcggcaatgtcgacatagtacgttttatgctgggccaaactatattgaataatagcgtgttctcgtttgttcatgcttatcgcaactcctcgtttcaatccctctacgctatctatagtctaatgtttatgtatccgcttgcaaacgtaattatttgcaagattattctggtaattattgcgcaatgctccataagcttttcttaatcaaccggttatgctggggattgtttatttagttgctagcctaatccaatccattaccttatccggtcaatttatcgcacaaaaaaagagcatcttaattaaaagatgctcttactagatatgttttgctcgccatattcaatggtaaccccctaagtcaaaagactacaaacataatcctttaacgcgggctgttaaacctcaaaatgtgccgacacgaacatattcaattattttttgatattgtagaatgagttgatacctttgtatgaagctgtatcgcctaattgttcttcaatacgcattaattggttgtacttagctaaacgatcagtacggctcattgaacctgtcttgatttggccagcgtttgtagcaacaactaagtcagcgattgttgtatcttcagtttcacctgaacgatgtgaaacaacagctgtgtagccagcttctttagccatttcgattgcttctaatgattctgttaatgtaccgatttggttaactttaacaagaattgagttagcagcgcccatcttgatacccttacgtaggtaatcagtgtttgttacgaagaagtcatcaccaacaagttgaactttttcgccaagttctttagtgattgatgcccagtcttcccagttgttttcatcgataggatcttcgattgaaatgattgggtatttagcaactaagccttcaaggtatttaacgaattcaggtgttgtgaattcttcaccagttgaccaacgtaatttgtatgtcttgtcttcgttgttccataattctgatgaagcaacgtcgatagcgattgaaatatcttcgcctggtttgtaaccagctttttcaatagctttgatcaagtattgtaaaggttcttcgttgtttgcgaagtcaggtgcgaaaccaccttcatcaccaacagaagtaactttaccgtcagctgataaaagactcttcaatgcttggaaagtttctgaacccatacggatagcttcgtgtacagatttagcaccaacaggcataatcatgaattcttggaaatcaactttgttatctgagtgagcaccaccgttgataacgttcatcattggtgttggtaatacgtgagcgttagggccgccaagatattcgtacaatggtaagcctaattcgtcagcagcagcacgtgcagcagctaatgaaatacctaagattgcgttagcgcctaatttacctttgttttctgtaccatctaattgaatcatagcagcatcgataccgcgttgatctgtagcgtcgaaaccaatgatttcttttgcaagaggaccattaacgttttcaacagcttttaaaacacctttgccaccaaaacgtgatttgtcgccgtcacgtaattcaacagcttcatgttcaccagttgaagcacctgaaggaacgattgcgcgaccaaagccgccatcttctgtgtaaacttcaacttcgacagtaggattgccacgtgagtctaaaacttcgcgacctaaaatatcagtaataattgacatgtaattttctccttttttggctaatgctaagcattagcgcttttttggatgtcaggcaaagcctacatctattttagctaattttacgccattcgtaaacaggaatgcgttaaaaattagtcgttaaagtgaactaagtctaagaatgaagcaggttccatacttgcgccaccaactaaaccaccgtcgatgtcttctttgcccatgatttctttaacatttgcaggtttaactgaaccaccgtattggatacgaactttgccagcaactgtttggtcgtataacttagcaactgtttgacgaacaacagcacagatttcttgtgcttggtcagcagaagcggttttaccagtaccgattgcccagattggttcgtaagcaatgaccattgagctaacttggtcagctgaaaggcctttaagaccttctgttacttggtttgaaacccattcttcagctttgccagcttcacgtgtttcaagtgattcgccacaacagaagataggtgtcatgttgtttttgaagattgcgtgtgcttttttgttgatatcttcatcagtttcgtggaagtaatcacgacgttctgaatgaccgatgatgacataatcaacacccatttcattcaatgtttttggtgaagtttcgccagtgaatgcaccagcatcttcgaagtaacagttttcagcagcaacttttaagtctgtgcccttagctgcttctaataaagcaggtaagtcaacagcaggtgcaccgataactgattctgtttgatcaaacttaggtaagttggctttgatagcattcacgaactcagttgtttgagttgggttcatgttcattttccagttaccagcaatgattggtttacgcatgagaaaatctcctcttaattttaaattatttgtctgaaatagcagcgataccaggtaatgtcttaccttctagatattcaagtgatgcgccaccaccagtagaaatatgtgttaacttgtcgccaacgcctaatttcttaactgcggctgttgaatcgccaccaccgacgattgttgtagcgcctgataagttacctaagaattcgccgattgccaatgtccctttagcaaagttgtccatttcaaacacacccatagggccgttccaaacaacagtcttagcatctttaaggacgttttcgaagtcagcaattgctttaggtccgatatctaatgccatgtagccatcaggaatgttaccttcaacaatttctgtcttagcatcgtttgagaatgcatctgcaacaacgttatctacaggcaatactaatttgtcgccagctttttcgattaattctttagccaattcgatcttatcttcttcaactaatgagttaccaattgataaacctttagcagcgtagaaagtataagtcataccaccaccgacgatgactttgtcagctttagctaataaatgttcgataacaccgattttgtcagaaacctttgcgccacctaagatagcaacaaatggacgttctggagcgtcaactgcttcgcccaagaatttgatttctttttctaataagtaaccagcaactgcaggtttgttattagctttcatagctgttgcaatcccaacgtttgatgcgtgagcacggtgagctgtaccgaaagcgtcgttgacgaacatgtcgcctaatgatgcccaatattcgcccaacttaggatcgtttttactttcgcgtttgccaaagtcgttgtcgatgtcttggaaacgagtgttttccataaccaatacttgaccatcagtcatcgcattgattgcatcttctaattctttgccttcgtttgaagcaacgaaagcaacgtctttgcttaataattcgccaagacgtgcagcaactggtttcaatgtcaattctttcttatcttcgtcactcttgatacggcccaagtgagaaagtaagattgccttgccaccattgtcgatgatgtattggattgttggtaaagcagctacgatccggttatcgtcaccgataacgccgcctttgattggtacattaaagtcaacacgtactaagacttttttgcctttaatatcttttaaatctgcaactgtttgttttgccatgtggacaaacctcctagattttcataaaaaaggcggaaggagtttacctcctcccgccttataaaatgctatcgcattcctaagttcacaaaagtgaaattagattaagctagcaaatttttctaatgtacggatcatttgagcagtaaagcctgattcgttgtcataccaagcaacaactttgacaacttggcctgcgccaccgccaacgatttgtgtttgagtaggatcgaatactgaaccgaattctgtaccaatgatatctgatgaaacgatttgatcatcgttgtaaccaaatgattggttgccttctgtaactttcttaacagcagcgttgatttcgtcagctgtaacttctttgtcaagagttgcaactaattctgtcaatgaaccagtgataactgggacacgttgtgcgtggccgtcaagtttacccttcaagtcaggaacaactaagccaagagctttagcagcaccagttgaatgagggatgatgttagcagcagcagcacgtgcagcacgtacgttaccaccacgatcagggccatcttgtaatttttgtgtagctgtgtaagcatggattgttgtcattgtaccagctttgataccgaaagcatcgttaactgctttagctaaaggtgctaaacagtttgtagtacatgaagctgctgagatgatgttgtcgtcagctgtgattgtgtcatcattaacaccgtaaacaactgtcttaacagcaccagcaggagctgagataagaacttttttagcaccagcatcgatatgagcttgtgatttttcttctgatgtgtagaaaccagtactttcaagaactaagtcaacaccatcattcttaacccaaggaatattacgtgcatctgattcagcataaactggaatgttcttgccatcgataacgatgctgttttctgtagctgatacttcgtggttgaattgaccatgagctgtatcatactttaataagtgtgctaacatgtctggtgatgttaaatcattgatagcaacaacttccaatacatcactgtttgttgcgtaaatacgacgtaaagctaaacgaccaatacgtccgaaaccattaatccctacttttgtagtcataatagaatttcctcctttaggaaatgaaaaattttttattttaaagggttgccccttgtaaaatcgagtttgcggcaccttcatccgttattaaccacgtctgtttcggtgcgaggtgcatgtacgcttggatcgcttgggctttagaagcaccacctgcaaccgccagtacacacggaatattcaataagtcacgaatctgtaatccgattcgcggaatcttgtacacgacttcgccttgtgcattgaagaagtaaccaaaggcttcacccaccgcatgcttttctttaagcatcttgatggtttcaatcggcatctcacgacgttcagccatcgcaatggcttcaccaatactgtgtaaaacaccccgacttcgttcaatcagttttaacacttcttgaacacttggttcttctaacaaaggcgcgtacgtcttctcactcacctgttcaggcacatacaatgcccgatgcttaccacctgtctgcttagccatttcggcacagactgcattggcctgaatatcaacactttcaccaattccccctcgagctggcacaaagattagattgcgctgtttcgatagatcagttgaaagttcatgagctgcttcagccatcgttgttccgcccatcactgccacaacactttgcccttgtggtaataataattgtaacgtactattgactaatttgcccatttcggtgaggacttttggttgttcatcactattgccagaaacaatcaagcaatgttcaatgcctaagacttgactcaactgacgttcagtctgatgtaaccctaagaattgatccattacttgtcttaactgatcgagggtttcattccccttcacggttaaaaccatacctgatttagacgaattaagcaaaccttgtgctttcagaaaatccgtctcagttctaattactcgctcactaatcttcagttgttccgcaagcgttcgtcggccaactggcgcgagccaatcgatatgttgtaacacctggtaacgtttcttaatgataccgacgaaatctggcgcaaccgcttctattgcagttaattcatcgcgcaattgctatcgcctactttccgtgggacataaaatgtccatctgtgtcattagtcgacccatggttggcaaaaaataaaaggcaacttactaaaactagtaacttatccttttgaacaagaccattataacaagtgcagaaaacagatgcaatgctttggggttgatgaatacgttttctttccgaatattttttaaacgttgatttatcgcgatttatcaaaatttacacttgaaatttccgcttaactccgctaatataatatattgtactgttgagtacacggaatgcgtcgctagtgtaatggatagcacccaagattccggttcttgagatccgggttcgactcccgggtgacgcatatatataccttttgtaccgggctttgtaagtcctccgtgcagattggtgcagaaaaagtataaaactcgtcattaagttgacgggtttttattttgcctttaagtagctatccgattcgttctgcacccaactataaatcaatttatattatagaagaaatcaaaaatgccaccctaatttaggatggcatttttatttatctctgaattgcaacattctggccgcccaccattaagcaaccacattcgaccatttcatccatctggttatccagttgaaccatcacatcatgaatggttctcaaatctgccgttggatcgtggcgacaaatgaacaagggtaaatcatttcgcgtgtaatagtaactcatactacccaccacgccgattccttccttatataggtcgacatttccggttgggttcaaaactaaagaatactgatcgttaatccgtgctggttcaaactgcttcattcaattcgctcccgacttcttaatctgaataataatgaccaatcaattttaaaaacgatattatagaccgctattgctgtataagaaattcatgtctttttgatatttctacacaattatctataattttaataagtttttctttgaacacaactatatcatcattattaattaagaaaatatcttcatttattaatattgttattgcactgttcataaccaatactaacgaagaaataattctagaatcaatatctctactatcatcaaaatcaacttgtctcctatcaccattttccacaatgttttttctgtaaatgttatgaaaactgccatgtacttctcctgaattcgacttatatacagtatatatttctcgtgatgaatcaatgaattttgtacgctcccatgcgtttggataattcagcttcctaggtatatctcttatttcatcaagagatatacctgcatcttttccagttcttattattgattcaatcattctactctgaatatttgtctctttacctgaatgtttgatatcatcttccaatcgcttgagtaacgcttgctcacctttcaaactgtttttaatatacttggaaaacttttccttatcatctgacattatcaaatagctaatattaacaacgtcctcataaactaatctaaacaacgtagcaagtccagtgaaattttgactaccagataaccttaaaaaagactttgccaactttatcatctgtacaagctgacctaatattactgctgacttctgattttctgcatatccatcatctaataataattgtatacacattatataatcctttagattttcccaagacaatctattgataacacctatatcttgaattttacccacatcaatcttattatcagagtttggcattgcttcaattttactagaaacatggcttaatttaatttgtacttcattcatgtcatattctccttaatataaatattaagtctataatacacctaaaatatatattattcttaaccgttgagttaattaaaccttcatatgtatccccctcctatcgggggatttttttattgttctatgttaatcaaacgacacccagacattattggctgtgcctactgggtggactggcatccaaactgagtcgccgttgttggttgtccagtgacaccaaacatatccatcacgtactgagacgcggtcatagtaaattgttgtatgtgctggaagtttgccggcgtatgtcgcgcttagtgatggcgtgtctaagcgtgcttggattggttggtcaccatttttgaagtgccagttttcagtccattcacttgcactaggtgcggttggtttagtaggtgtcgttggcgctgtggtgttaccgccgcctactgaggttgtccctttcgccaaatcattcgccaacttagctttagaaacacccattgatgctaaataaccgtaagggtcgacgtgatcaccccagatattttgggtaatccaaagatgcgatttaatccctggtgttccggcgccaccagcatccaaggtcaaaggaatgccatattttttagcgtagtcacgcgcgagttcgatgtaggttgcgtagtttttagcaaacgtggccttgtcgtacgtgtgctgtagctcgatttgaactgggctgtagccgttagcgtcacctgcagcatatgcaacataaccgggttcgccgatttgatagacatgcccgccatcaccgacgataaatgttgagtaggcagtatacggcgtataattatttttcatattcatggcgacgttcacaccaggcgcttcgccaccgacttcatgcaagattaaatacatatttaaagcacgttgcgagctgccttggttggcattgaaagcatacgtgtggtcaatcgaatacgcagcctgcgcaccggttgttgttcctacgcccattaaaaaagccgccattccggcgactactagtttcattaatttattctttttcattctctggttcccctttttgataatattttttaacttttgaaatgatttcgtcttttagtaagctaaaaagccacattggaaagtatttgttccatccgaggacataaacattacttaggactgagttcatgttttgtgcgataaacgctgcggtgaagactgcgaatagaaatgatttacttttgagtacgaaatccatccccatgaagccgaagcagataaaaacgatgatggcgtcgcggatcagcgcctcgttaccgtagtgactgttgtggagcataaccggtgaccgatgcgcgaggaccgaccccgacagccaatcgcaacacattaccacaaccagcacgacgatcatcaccgcatgattaatcgtggggccttgatggaacacccatcccgggattttaaaagcaatggcgacagcggcagtctgcaggagcattttcggttggctcattttgtgaaactgcactgctagcatgtcaaataaagtttgtaaaacaatcaataattctggtgcctcctttaatgatggtataaaaaatagcaatccagaggaggattgctatcatttattatttttatttaaatattttatagggataaaagattctgtttatcaagataaaacgatctgacatccaacaaactgcgagtgcaatgtaccaggtaattagactgataccaatgattagtataaaataatttgttacccctaaatgcatgaggatagttcttataacagaggtaactggggcatgtactaaataaataattagagaatatctgccatatttattaaagtaattaaaaaaagtattctttttaatatttgaaaatagatacactgaaagaggaattgaaactaatttcgttaccatattattaaatcctaaggtatttgtatggtaccaatcccctcctaggttatattgatataaccatcctaaaagaagtattactattagaacaatagctatcttcttattaattactatatccaagtctcttataatataacccatgtaaaaacatatagcccaagtaaaagttcctgcgaggacgtatggcatacctatcaattgactcattacgaataaaataagataaatagtcaattgccaatacttatttatttttaataaatcaagaaatccgacaagtaagaaaataaaaaataggatatacaaaaaccacaagtatccaattggtttcacataaatctgagttaaacttccccatgaattcaaactattaacgctatttcccatatgctgcatcgctacatatactatagaaaataaaatatacggtataaataaattcactgccttctttttcatgctttgtaaatattctctagttgttttaggaattttatataaataccctgatagtgagaaaaataccggcataataaacgtgaatataattcccattaaaaccttggacaactcattatactgagtataattacctgtcttataaacgccttcaagtacatgtgctagcataacgaaaaaaatcgttataccttttccaaaatctaaccactcaattcttttcaatcgacaatacccccaatagttattaattagtaattataccataagtaactaattggatatatgcggttactgtgtctctcccacaatatctctatacttagattgagtaagttgatcaaattcaacagccaactttagatcttcaaggcttaactcaccatgccggtatagaaactcaatatattcttcattcattagatttcaactccttcaactgcaattgtaaatctaagttcatcttgaaaagatgagcattaatttcatcttgttgtgttagtacctgttttggttcttcgataattggttcagaataatctgaatttattacaactgaattgttaactaataagtaatattttggtttaaaattagtcctaaaatcatccggaagctcaccgctatattcaatgccgccttccataccgccaatttcaacataagcgataatctcacttttttcattaacacttaaaatcattatctcacccccaagatattgttaatttgaaatgatccctgaccaacgttatattgagccgtccctttggctaggtttgcaataatatggttgaagctgcctagtttaagattggattcgcctattttttcaagatagccttcagcgatatcaatattcacagtattttccaccagcgtattcgaaatatttaatccgacaaaaaacatttgcgatggcaccccggttggaaagtctgatcgtggtacttgcattcgtacactcccaattgctccgttcaagttgtaagtgataattaagccatcgtagaagctccacttatcaattaatttaagtgtttgtcccactgccacatcacccataccactccataatactgtttcagtggtaacttttgtccagttgcgcggataataaagtccactagtgtcaccatgagcgatgacttttttccaagttgaacccgtcgggatattcgttgcacacagaatcttgtcgccatttttagccacagatacatcaataaaaaattcattccccatttgagtaattggggcattaactaaattactccctccaacgtattgaccaggcggtaatgtattaacgtcggtatttttatcattaagttctatccgatgatcaaaaagtgattctaactggcgcttcatctcaggacttgcaaggcccggattctgccgactaaccaataagtcagacttagcgtttaacgcggtaattgaccgcgcaagtaaattaatcgtctgttttaatttcatatttttcctccttaataatcatattcacggcttgttgctcgaccaactccagataaggttacctttgaagcggctggatcaacagttacaactgttatccctagtgcattaatcgttccgatattatccggattagtattacaatcgttaataaatagaacttgcgtaaaattatcccgttttgtcatctgctcaatgtgaacgtgaccagcccataatccagctaccttacgaggcccttgcgttgtaaaatcagcagctacgattgcctgtaattcggtagggactccgtcttctgatttccctgtataacgtccgccagtcgcaaccgcattaagcaggccttcaagaatattaccgttagcccaagtagtctcagtgctaggcgaaaagtcgtaaactagtggaatgtgagtcgtaacgacaatttgataaccttctgggatattcgacaaagcctcattcactagccaatcaatctgtttttgactgtaagaataatctagataacgagtaaactttaaagtcccatcatcgttagtcttatcctcagggacatccagcccgtttaaaccaattaaacgaattttcgaatctggataatccttatagaaataaaggctatcgccatcacgtttttcatcattaggtagattgcaaatttaatccgaatttttggacaaatttgtcagcataacctgatacggtgtttgccagtcgagtattttaagcggtcgctggttaatttggagtaacgtcgtcgttaaatcttgagcactaatgtgctcaaaacgagtccctttaggataaaaataacgtaaattccgattaaagcgttcattactaccacgttcagctggcgtataagcatggcagtaataggtcttaataccatattgtgattcaagtgatactagcccactaaactcagtgccacggtccacagtaaagctgtgcaccggaccattaaaagtggttaggaacttagttagtgcttcattaacagtcgctgtcgtccgatcttttaaccggtatgcccaaaggaaccgtgatttgcgatcgattaaagttaataaaactgccttactatgcccacgaggaccaacgactgtatctagttcaaaatcgccgatgcgcttacgttgattaatcatcatgggacgctgttcaattgatcgccccaaagattgattatatttggatcgttggtcaacgttacgccgttggcgtacgccatgttcaggtagatcattcaaggagaaaccaattctcccctgatttagccaattataaatagatttagtagctagtttaaattcgtgagcaatcattcctggtgaccagcttagacgtaaatggttgagaattttttgctttaactcatcgctcagcttagttttccgaccacatcgtgatcgcttgtattcggcatctgtttgtgctaattcagcctgataaggttgacatcgagataattcataagaaattgttgacggtgatcggttcagccgaacgcccatttggatattggacagccctagttcacaaaaggtttcgattttaattcgttcggaataggttatactagacaaaagatcagctcctaaaagatgggtttgtggtaaacaccattttaaaggaagctgatcttttttgtccgaacagcgttcggattaattttacaatctaccattaattaattcaccagttctaaagagcttttcaaaatctgcctctttaacaatcatatccggggttagttttccaagtcgtccaccagttgaagcgtcgtcgtgattaccaagtagaataaacttatccgcgtcggtttctgtttgtaacaccttcgcgcaatattgagcttgatccgcaattgaatgactcacatcttggtttaagccgttagcattatcgccaccagcaatgaccacatccacatattggcttatataattaacagcatttagatgagctaaagcatccgaggcatatgggtagctaaacgggctgctttcatcgtaaagatcttcataatgtgagtcggttaccattaaaactttaaacccgtctctaggtaaggttaatatgaattcatctagttgttctttaataacagggtctaattttccgccaatatctatagattcatcagttatcacagtactgtcatccacggtaatcatgtcatccatccgtaaaccaattgttttgtaggctaattttcctttaggctttcttcctgcaatcacttcatcaaaactcgtgctaccagatatttgattgttaaaattatcctcgatatcagtcattcgatcatcggcatttttaacagcatcatttactgaattaaccgcaactaccaggaagtttcccactgattttgcgaatccccgcaaggcttcccaattatgctgtttctgatttctagcttctctattttgaaatgggcttggctcatcccatagatcacttaaaaagttaggtattttcaatttttattttctcctttctcaaccttaatctcacctttttccacggtgattatatacgtagaaccgtccaccttatctgtcattaacagttcggggagcggttctatttttaatgcatccaacttaaccttatccgctgcactcattaacccgtccgttgttgatgttgccggttcgtactttggtatttccggtatcactggcagcattcccgttacatattccgctagtccttctacataattaaccgcggtggcggcatagaattgttggtcctttttcagtcctaggtctgggttgtctgctgggacttttaggatgtaacccggcaactgtgggccggtggtgcgtgttaatccggttggcatgccgtataggtcgccgatgaagcgcgagtcgtaggccttcactgccttttcgttggtggctttaatttcttgtgctgccgcctgattatgcttaatggcttccttaaccagtcgttcctgagcaatatcttcgtctaagagtgtccggaccgagttatccaattcgacttctggtttatgatcaggcgcgaatggataatcggtaatgccggtgacttcaacatcagtgtcgaattgttctggttccacgcgcaagtaccaaacctcacccggtaaaacttggtcatcaccgtcataagtgagcgccattgtcgtgactggatcagcctgcattgaactcatggcgtaggcgttcatggcatttttatcggtaaacctttcatccgaaatctcggcacccggtcgctcaccccaccgcttaatactcgtggcattcttggccataaatggtgggaagtaatactggccttcggcgccctccttttgtttgccgtaacacatcgtgacgttttgaatcgcggtggtgtcccagctgcagctgaaagtcgtcgtgttgtagccgtaaagataggacttgtcgacctgcttctgccaagcgtcgcgggcgtaaatccggatgtgcttgttgtcgggatagattacgcaattgaacttatcgacgcatgtattgagcgcgtccagtgcgctggtgttgcccaagttctcaatctgaaccttgctaaattttccgataacctcccaagtaaaaccgtagacgttgttgtcgaaaaaatagtggaggatatcttgaaggctgtaggtgatggtacccgatttagtttgatagttataaatccgtgtcgcttcaaaataaatatgtgtcgctgtgatagccactgatttgtcatagccatccaatgcccgctcagcttgtttaatcacgtattcttggccatcaattagcagtgagttttcatttcgcaaaagattataggctaatgagccatcatttagcgctgtgaactcaacctgataatctgaattctttttccaactacgtactagttcttcaaaattaatcgaggtgactgtttcctcatattgattattgaaatcacgaaccagcactttctgctttttaaaatcaatcatagataaaggaatgggaaactaaaaatgatgtcgatattagtcaatccagtcacactaatatcgttccatcccttttcaagttggatatggccgtgatttgtggcgcgctcacaagttgttccgttgagtagtgggcgcacgccattccaaacgagcgtgtcactcgctgtgagcgcacgattcagcacaataccgtaaccatttgtgagattcgtaatggttggtgtccctatccctttgatgatgatgtccaaatcatgtttctgccaataaggatcaataactacatcagacggattatagactttaaatctggtctgcttgaagcggtatgctaaatcttcaccattcggtaaattcatcccaatttgagatagttcttcatcataaataaactgcagccgatcggacttcactaaagaatggcgatacccagacggcatatcgaattcaacggaaaaggtcatttcatgccaatttaatctggtaacatcaaatggttttgcaataacttccatattaagtccaggcatttgagattctcgcaacgtgattggctcacgagaaaataaaagtcgccaaatatcttggcacgctaatttatagtcataaacatcttcaccgtcaaaatagaaatcagcggtaactgttcgactgccaaataaaataggtccgttttgaacggacccatctctaattttatttgactgatagtttgtaatgctttgtggggactgtgtcgttaatccggtgaaattcaaccctttaaacgcatcgatattaatcgtccgcccctcttttgtcacaaataattcaggaatcatctgaacactcctatcctaattgatatttttttaattgtttcttagtttgctttgcttggtctagcaggtcacctaattggcttactagtccggttgaacttgcttgttccggattagcctggattaacgcaataattgtattaatcatttggagtaacgatctgaacatctcaatcatgatttgctgattacgtgcaatttcatttaagattttagagtcattattagtagttgttgaacgttggtcttttaggaccagttgactgccaccatccaaaccgtatcgatctttaatctgagctagaatctgcatcgctctggtgcggttagttaatggcacaacggcttccgccttattaccttcaccaatccgcgcaatctgttctcggtagataaacccaccattttcatagccatggcccttacctaagaaggataaatcacttccatagcgatgctttgcataattcaatccagctagaagattatcgaaaccgttcataatattaccgtggccctttagcttatatgcattaaaggtgcctggtttaacttgcattaatcctgttgctttcccctctgatacgtaaccgtcatcgccaccaactgccttaggatttccgccggattcggtttgaatctgacgaagaaccttagcaatcatcgattgacttgtagagaggttaagcatgcctagagccttcttaactgagttgcgccaccgtgcaacacccgagccacttggttctgaagcatcattttcagtcttccaagatttcaatgcttcaacaattttatctttgaccgcattaatcacgtagccaccgacacccttaacattttcaatcacaaaacttgtcttaccgcctaagtttaatttagactcaaaagcttgtttcaaatatttaatcggatgtgcaataacattcccgacaaaagaaatgctatctttaattttgccaaagacaccagagagtgctgaaccaatatttcctaacgtcccatttttataataatgaccactcgtcaaacgttctgtatcatcaccattaaggacatgcgccccttttggcaagaacatttgtgtgttccaaccatcaggaatgactgcctgaccatttggatagatcaccatttccttcttgccaccgtcattgaccgttgcaatctgattggttggcacaccattcggatacatcttagtcgtccctgtcgcccacttcaccgacggaatgtgaccgatagctttagcaccaaatttagaggttaaccagttaacaccgtcaatccctgaattgactaatccagaaataacatttaatacgccaccaacaattcctttaaacgtgtcccaaatacctttaaaaatctgtttaacaccagaccatacttttgaccaattaccggtaaagacgcccgcaaacacactgaatgcaccttgaatgatatttaaagcgccttttacgattgtttgtaaactcccaaatacttggctaaagacatttcgaattacatttaatattgcagaaatagttgctgataagacttttaacactaccgacacaatggacaacacggctttaatctttgcagtaacaacaattaagatgccaccaaaaatattggtaaaggcctgtttcatatcgttaccatttttatgccaatagttaaccatcgacccaatcacttgactgaaaattttaccgattcctttaaaaattggcgtaattgtcttactgattgaactaacaatatttttaattgaagttcccatcgaattaaaacttgccctaacttgttttgttaaagcaatgatcgtatttgctactggtttagggaatatattctgtaatgctttggcgcctgctttacttccattgaaaacttggaacatcgctttaaacgcattcgctacctttttagcagctcccgcaagtgttgttccaacaccggttcccaatatcttcaatccgtttaaagttgttttaatcttattaatgcctgccaaagttggtccaagcgtccccatcggtaagagcttggttaaaatactagtcgcctggctggcttttttagaactaaagctatttgtaaacaagtctgaaattgcttttgaaattgccttaaacttagccactccggaattaaccaaatcatggaacggtttaaatttcttatatgccaatacaaagccagttgctaatccggcaactgctaaaacagctattccgattggtccagtcagcgcagtcgctaaccaactgccaccacctaagaaactcattaggccttgaacggcgccagcaagcgaaccaatcgacctaattagagcaccaataccaatcagcagtggtcctagagcggccgcgcctaagattgcaaaggcggtaattttacgcgtcccttcaggcatctcagttaatttacccatcaacttcgaaacaccgttggctacagacgttaatgctggtaataaagtcgtagaaaattgaatcgccaaaatattagccgtctctttaaacttgttcatttgattctgagcggtttgcatatttttcgctgataaagtcgctgcgtaattactcttagcagcacgatctgtttcatctgccaatttaccaattttatttccattttcttcaagaattaacccggcttgttgaccagttgtaccaaacatcccatggaataaatctaatttcttggttttactcaaacctgataatttctgttgaaattgactcatgatatttgataggggccgcatttgaccattagcatctttaattgagataccatactcatccaatgctgcttgtccagacttagtaggactaactaaactattaatgaccttccgtaaaccagtaccagccttatcggcttcaagaccgttattagaaagtagccccattgatgatgcggtttcagataatgacaaacccgcttgataagcagagccaccaacatatgacatcccaatccctaaatcttggaaaccggttgatgttttatcagcaacgaacgctaatttattcgtcacttcagtggtgtttttcatcatcccagtagttgaatttgaccgcatattaaacgactcaagcgtagaagttgtcaccttaataacatcattaaaatcatcgcctgaagcaattgaaccttggagcaaagtattcatcgacccaattgcctgattcgaatcataaccacgcttaaccaaatccaagtaaccttctgagattttttgaactgaaatcccatacttagttgaaaactgttcagcatctttggtcatgatggcagtccctttaatagcggcttttgctgattcaccaccagtttcaatgttattctttacaacttgcattgtgtgctggaacttagttgcttgcaccgttccgatggtaaaggcgccaactgccaacgtactaaaaccagtcagcgaatgaccagctgaactgacatgatcaccaacttcttttgttttagttgaaaaatgcccaagcgaatcaaccgctcgagcattcctttcagacatattcttaactgatttaccgagctcatcatattgatgttgggcttttttctgctcactcgttagctcaacaatcttcgttttttgctctaaagtttgttgcgcatctttgcccttaatactaattaaatcctgcagctttgatttctcagcaccaatcaatttattataatcgtctaactgacgacccaatgactgatacttaactctgctagcttcggtttctttgccttgcattgataaaactgaaagattagctttcatctcacgagtttgccgactcaatgcattttgataagtctgcgtaccacgttcggcttcacgcattgcgattttagcatcatctaattggcgcttataattggcttgttcccgcaccaagttattaattttagccccagttttttgagcggtatcagaatactcaccattgattcgaacttgttccttgtacgacttagtgagcgtctcaatctggcgatcattgacgctcatcactttggttaagccgtcaactcgaccagccgctttatcatacgcagattcggtgctacttaatacggaaagattggctttcatctcggatttagctaacttgaactgattttgaatattttttaaaccagtttcaaatttactcccatccatccctaaactaacaaccattgagccaagaggacgtcctgcaactgccatattttatcctcctttctcttagaattggttgtaaaaatcaaccgcagatagatattgtgtgttctcatctgaagtcggctgatctgatgacatccgatccaaataatcaaaaaaggcgcccgcatccattgactcaatgtcattgaatgggatcccattttccattagctgttttgtaatatcatcaaggacttcaagtgcttcatccggcgttatttttttgctggatgatccgcatcggccttaatcccacccatagcatcattaagaattttttgtaaagtttcgattcctttacttaaatctaaaccagattcaagtgtcttagtggttaccttgggattgttaaataattcaacaattaaagtttccattcgctcaatatcttcaatttcactccctgacataacttctaagtactcagcttcctcagcagtagttaaaatattctgatcaaatttctgttttaataaatttgattttgcctcttgtaggctcatttctttattgaatttagcaatcttcttaaacatcccaaattcaacgtgtgtcttttcaaaatgtaatgtgtcgccagttttttcatcgtataagtcaattttaatcataatagttctcctttttatttatgctgcagtaattgtgacgtgacaaatagcggtcttactaccatcttcagttgtcactgtgatatccgcttcaccaacagcgacagcggtgactttcccttgaaccggtgtcacacttgctaaattaatatctgacgttgaaaatgcaacggtttgattcgttgcatcacttggttgaaccgtggctttaagagtagcagtttcgccaacctttaaagctaaggtcttctggtctaaatcaacgccagttacgcttttggggactcaccatctaggttttctaagtcgccagtccaaccgaggaacattttcgctgcaaattgttccaacgtagttccattgcttgaagttgccttcgctttaacaactttatccgttttacgggtaattgcttgcgctgaaagggcaacgttgttgggcgtcatccctttatcttcggcagtcttcaattcatccccatcggttgttccaaatttagatttaccaatcccaatccacattggattaccttctaaatcttgggcttcagcgatgattgctacatacggttgcttaacatctgacttagtcacatagattgagttctcatcaacctcatccccgagaacagctgttgaaatatcgtctggtaattcaactgcagataattcaatcttccctgtcccagtaccggcatcagaaatccagtaagcgatatttgaggcgtagacaacattcgactggccagtaaatccggtcgccttaaaatcaattgccccacctgaaatttcatcaatcttcacaactttaatgaccttttcatcagcatccatgatgcctaagaaaacccgccggaatccggcggtcccgattgcttttcgtttagttgtttctggcattatttttccctcactttttgatatttattgaacctcatcgttaaaacgacgaagctgtattcataattcggattaacttcaaaaaaagagcactcaaattcatgagcgctcaacaatgcttctatttgggttaaaaactgttcagcttcgcgatttgtttgaacataaaccgtaatctgtgctgacgtaatttcaccatgttttttgttaccagaatagtaattttcggtaaccggcaacccatgaacttgaacaaatggcgtttccttgttctgcaggacagattcaggaattcgttttagtacatagattcggtcttcaaacgcttctactgctttcagaatattaccaacctgaatagcgccaattctcatagccctaactccttctttaatactgtagcgaccgtagtctgatagagttcttgggtatcagtcacggtttttgaaataaacggattcggcccgtagttaatggtcccaagctgaacaaaatggacccgccaataggtatccttaccaaacccaacgttgatgtggccaaattgatcaacacccgatatttgaatatcatctcgcatgtgtttaaagaccgacttagtgcccttaatcttgtccatctcgcgctgacctttccaagaacggtcggattgatcctcataaggggtattttgctttaaaacttctgcaaagagctgactaccagtccgtgttgccttattctgaacgcgtttagacttgttacccaaaccgttcagaccttcaatgatattatcttcaatcgtaaaactcatcactacacctccggcacaatgtgacagataatgacatcccactcacggtattgggtatcttgattaaaatcatcaatttgatactcagcaacctgaatcttctggtcatcaacctggcgccagtgttgtaatatcatatccgtcgtgatcagtttttcttgcctctgccggtgtcgaatcacgaattgtgcttgtgtcttcaatgtggctaaatcttcgccaacatcgtcggatttcttacttcgttgcatggcatacagcttctcatagacaacctcatcttgacggctgacgttatcgccaaattcatcagtctgcgtttttcccggaataacgattgagattgtctggtctaattgacccgtttcagctatcggcaccagaatcacctcctcccttaaataaccggtaagcgggtttcaattgtagaataatcgactgtacgccaagcggggtctccttgacatttccggtggtagttgctgaacgattcttaaagaagtgatcagtcaacatgacaactgccatttcatatagcttgttatcttcatagaactctggcttttgcgaaccaactgcgctctgaatcatctcttcggcggcatctaatgacagttgccacatactattaaagacatcactatcaatcgctaatttattttttaaatcagttagttccatctaatcagctcccgtaatcgtgacacggcatactgcagtcttgctaccgtcttctgtcgtgaccgtgatatcagcttcaccaacagcgacggcagtgactttaccttgaaccggtgtgacggttgctaattttgtatctgacgttgagaatgcaacggtttgattcgttgcatcacttggttgaaccgttgcctttaaagtagcagtttcacccacttttaaggctaaggtcttttggtctaaatcaacgccagttacgcttttggggactcaccaacgactgctaaacggaatgctgaagctaataagatttgatgatcgaaccaggctgttaatccaaagtaattaatcccgttatcgtagtctttccattgttcatacaatgtcgatgcaatttcgtaatttaactgcgcatatttaaaattaccaacgactggtgtcattgcacgttcagtaaaacgaactggatagccgatgatttcttcgggtgccttaccaaaaagtgtagcggcaccgttcgaaagctctttaatcatgcgtaaataatcgggacggcgcatataaaccttcacattcgtttggaatgcatcgttgatatcacctgcggcttgcgtaatcgcatcaaacattgttgattcagtaatcttcttaataccaacttcatctgagtaaaagctcatgtgctcttcaccggatttaggcgttgttgcaaattggaccttcttttctttagccgctgcagctgaagctaatgcatcattaacgtattggactaatgcagtattggtaccatttaaaatagtttcagaaattgctactttcaatttagatttgaaacgattgaacgttactgtatcgccttttactttcaattctttagaaacttcttggtctgcaataaaatcgtcatcatcaattgaataagcaattcttggcaagattaagttcgtgatgccactgacaatttcatcttggcgcaatgggttgtcttccattggttcgctgatcaagttgtttgagacagtgacaggtaaaatgttttgaccacccgtagttgtcttatcatcgcctagggcttgtaagatattgttatcaacagcctgattagccattgttgcacgaattaaaccggcataagcatctgtgaccctttgtttaggatcatttgatggttctgcttgtttcgcttttttagcggaatcttgttcttcacgatcaatttgacgtttcaacatgttgaaacgattttcaagcccgtccgctttttgacttaattcatttaaggttgaatcttcaatcgcagggttccctgctttttgtgcaatatcatcgttaacttgtgctagttcagcaccaatattagctaagttttgtttcttctgaaataatgtgactggcattttaaaatcctcctagtgtttgtttaattaattggtttgattccgttgctttttgaatcattttttgacgtaattcgttatttggtgtttctggttgttttaataatgctgatggtacattttgatagcgttgcttgaactcatcactgattgaagcggccatttgattagctggtagcacttcatcagctaaaccatattcaactgcttcgctggcggataaccacgtttcttcatctaatagttgacaaagtttttcctcggtaatcttgccatcagatttcactaaataagttgtgacgcttgattcagcaattcgatctaagtcatctgcttgcttgcgtaactctgaagaattaccaacgcaatacgtccatggattgtgaatcatcagcatggcattttcgggtacaaaaatagtgtcaccggccattgcgatcacacttgcgattgaagcagctaacccgtcaacataaacgttgatgattgccttattctgttttagttggttaaagattgaaatcccttcaaaaacggaaccacccggcgaattgatgtgtaaattaatcacatctacatcccctaaggcctttaaatcatccctaaaagatgcgccggtagtatctgatttatcccattgataagtagtaatttccccatcaatgttgatactagcttcagtctgacttgtctgggtcattgaccagaacggcttgttgatcttctttggcatttgaactcaccccctttcgttgcgtcggatccatatcgattggatatagatcacctgacacaaataatttctcggccattggctcttttgacagtggcatatcttccaatcccaaaattgtattggttgaaaagaccccaccacgacgcatggcttggtaaaacgcagttcgtgcttgcacatccccacgcatcaaaccgttcatgttgaacttcaaataaagcccttgtttccgttgtgcctgtgttagtaatttaatcgttaactcttgctcatactggcgcacaatcggcgttaaagtcttctgaacaaattgcgtcataatctgctcattgttggtagcgactgtgttattaatattgttgatgaatgaaatcggaatgttgaatgcattcgcgattcgcgtatgtgtgattttttcggtattaatcacatccccagacacgaattcacgtttaattgggtcaacggtaaccccagtctcttgaaatatgacgccgccgttatcatttttaaaccgcttgaaatcctcaatggtattctcccgcttctcatcattaagattagcttcataagttaccttgaagctatccgtcttactcatttcattcagcgagaaggtcgcaactgccttatcaaatgccaatgcattcttgagtacgctaatcggcgaaatacccgttaggcgtgaagccccagtgatgtgtttaacgtgaatcatttgttggctatcgaccagcatgttctgattgacacctgtgatttgataccaaattgaattatcatctgtgttttgaagcactgaaacgtactctggcggaatcggccatagcgcaatgggctgtaaataatggtcccgttcgattaaagcataaccattgccgtccttattacgatcaacttctaacttattaatgaactcaaaagtcgtcatgaccggattgggttgatatttaatcagatcagcaaccgtcatatccttccgctcttcataattatcaaataacttcaatggcaatgatgacaaggtgtttgctaactgtgtaatgacactaaaaatcgtctcattcgtgtccattgcttcattgttaatcccaaagaaatgtttaccaatccatgagctgagtccgccacctttattactgccggtcgaccgattcttactaaaaaattgtctaagccgctgcatcatttgcaatatatcacctcctttcaattaaatatcattgaacgatacatatttaatccggccagttttcggtttggcctgcaatcgctcgaccattgttacatgcgcattcaaaaaggccgcgaacccatcaatctttcggttacgaccttgcttagttggcatccagttattcagtcgatcagtgaccaacttaacgttattgagataccaacggaacattttattattattagtaacgactcgaccatccaatagcaactccttaacgttttgcatgggaccgcccaacgtcgtgaagccttgccgggtaatctcagtcttaaagccgtaatcaataagtgcttggttcaagaacaacgccttagccttatcataattaatctggataatcttgtaccgtttggattgttcaacaaaccacttataaacatactcataattaacgtaatcacctgggataatctctaaataaccggcttgttcccattcacgcagtcgctctgtgttcttgtcaatatcaaaccgcgcttgtggtacccaagatttcattaaccaaaatactcggccatcttctaatttaaattcaagtccggcggcggtgaaatcctctgtttcagataaatcataaccaccaatacattccattccgactaatgactcaggatcaatctcaccattatttttattaatggtatctaaagtgacgaaactcaattcatcagttgaactaaagatgttgaattgcttggtaatccaatcagcaaattcagctggtgttttcttgtcttttttgtaatcagtgatcatatcaaccatcgacatcatgcagatatttggattggctttgacccataattcaggatcgtcagcttcttcgatactgtccaattttgctaaataatagaaggttctctcatccagatgcgcatcataatcagataaacactccttaccgttatcgacaaagtccattaatggcccatctaacacagtaccagcagttgaaatataaataatcaatggttgccgccgtgcgccccgtgagcgtttcataactgagattaattgataatctttatactcgtgaatttcatcaaacacggcaaaatggagattttcaccatctttgttattcttttcagcggacattggcacgattgtacaatgatttttaggaaagcgaatttctgaacgcgtcgtgacaaaccgctttgataagtaaggtgatacttcaatcatcgcttttgattcatcatagagcttccgcgcttgtgcttgcgagttggccaaaaaatagacgttagccccacgttcatcatcaaaaccagccatataatcggccaaccctgattcaagtgtggtcttcccatttttacgaccgacaaaaataaccccttcacggaatctgcggatccctgaatcacgatgaacccacccgcacatcgaaccaattataaaatgctgccatggttgcagaaccagctgcttaaaatcaccttttgacggcttacatttcttttcgataaaacgaatcgggcgccaagcgcgttctggatcaaatacccaagggaaatcatcagtaccctggcgcttcaaatctttcaggtggcgctgtgccgcttgaatattttcttcactggcttcaatcgaaccttcagcaaccatctcagcatagaaagttgttaatagctgcggtgatggttcctgcagataagcccagcctaatttttcagctttataagccgcccaccatcgttctaattgggtttggctgtaatcaagaatcttagaagtcatcttcatcaccgtcttcatcgtcactcatgtgaatggccatcgaagcgcgcgcagatggtgtcaacccaagttcattagcatagcgattcaacagaatagcggtgttacgtttctcgcgaacaaacggattaaccttaccatctttaaacatccctagttgtttaactttgtttttatgagatttataatccgctaacgtgtcacaataaatagctaatgtatctacatcgctatcactcaaaatgccagttggtgccataatttgagtaatttcagtaaatcgttttgctgcactttcgttcaaccatttcggagggacaagattatccgccgataatttcattttcagctcattcttttgacgtttttgaagctctttctttgttttattattaggatttccctccataatatgcaacatggcacttttagcagttctcggcatctaacatccctcctttcttttctgaaaacctccaaattggacgattaaaaaatttttgaaaaacgaatttattgtacggggaggtaatcaccgttgttttagaacttcatcaaaaaattatcggacctaggggggctactttaattcatggtttgcatggaacacaaaaacatctgctcgctttttctgtgcgtgcagatgtttagcttcttgcttatttgctgttgctttttctggatggtcctgattatggtgttcagagcaaatagtttctaaattctttaaatcacaacgttttgaccaattatcttttaatgggatgatgtgatggacaatgcgtgcataggtcacaatacctgcgcgcagacactcttgacataggtaatggtcacggactagtgccaacttgcgtgctgactgccatgccttggtgtgatagaagcggatatacttgtcagtcaatccactttacattgcaggcatagttgatcggtgacccatcagtaggtgccacctctgtgtagtcattggcttgtagtgcctgctccatcttagacttagagacctcaatcaccgtgcgaacaaactgcccattactgccaaccgtccggttcacttcgaatggtagaccactcacaccattgatgatctcatcgtattcatcttgcgacatcatcacgactctatctgccatcttgctcctcctttagcttctggtcatggatcacaccgatatgaacagccatcgcttctttatattgcaccagcgcatcttcaaatgggatctgtttccctctcgcatagatgcgcaccatgttgtacatgactctggttaatatatattctaattcagtcgtttcaacattcggaggtacgacaatcttaaatgttggatcagccccaacagatttccgactcgcagttgcattaatgattagcttttgcatggataattcctccttttaatttcttatgtgcgtgaagtctaatcagattcaattcaccccacgataaatctttaccctggattatgctgagcattctgtctgatgcataaataatagtcggtttcttatagtagttgaagccacacttgattctatgattcattagtatcactccttttaatttgatggcatataaaaagccgatattaaatcggccaatcaaactccttcatattgttgtatttataattaattactatcttctgatattttgcagcggttctttgatcttttttaacctcaactccatagtactttccaatagcttcaatactttccttcaagtttttcattattacgacatttatcattctaggattaattgattttttaatttcaaacatacctttttttacatttgtatctgttactattccgctcccatgagtgtaagctgagttaggcacgtataacccataatattcgttagcttcgcccatcaattcaaatagctttgcaattgattttgcttgaccatcaatattaaaccaatacttcctattggctcctatgtcaagaatccggacataaaagtacgaacaaatttgactttcaatttaaattacttaatttaattttcggaggccgaagttttagtcccgttcagattttaaaaacgctttagagtatattaaataagccccaacattattgaatttaatagcctgtagctacgctacaagtgaaatacgatcactgttataccaacgaatatagttatcaattccggcgattgcttcatgaattgtcttaaaatcttggaaattaacgtattcacgtttcaaaattgaatgaaaactttcaattcgcgcgttatcgccgggctgaccctttcgggagtaagaatgcttgataccatacttcgataaagtgttttcaaataagtcacttgtgtattggcttcccatatcactatgaataatttgtggtttaactgcttgcgccatgacttgggtaataacgttagtcgctagttctttagtcatctgcgtattaagttggtaagcaataacccgtcgggttactggattatagacactagctaggtaacaccaagtatggttaaggggaatgtacgtaatatcagtcaataaaataccagattgatcagttaactgcttaatcaagtttggtcgctgatcataatcagtctgagtggttggcttattgattcgtttaaccattctagatctaatccctaattcacacatttgttgatagaccagacgctgactaacgtgaatatcagactgttgatttagtaagatcgttaatcgtgggtagccatacattggatatcttaaccaagccgttaacacttcttgtttaattaaatgccggcggcgttcagttctacttggctgccaatgtagataatcatagtaggttgagcgcggaattttgagtactgataagatacgcgtaatgcggtgcccagcaagtaaattagcgttgacgacttctaacacgagggcacgccctttaataattagctttttgccatgagcaccgccgctcgttttaaaatatcaagttcttcttttaaccgtttattttctttaatcagagcacgttcatttgatgatagcactttagtgttgttaggatcagcttgtttaatccacttagtgaccgttgaaacactgacgttgtattctttagccagtgagttggccgaacggccagtctgacttaagctaacaatcgattctttaaattcatttgaatatttaattgccataataaaaagctcctttatgatgtattatatcgaacagtttgtccgtaattccatcataggagccattcttaattcttttttgaaacaattcatcatatttttctacaatacttgcctgatattcatcaaacgttccatatttctttttactttctatttcaaatttttcttttattccttgctttatagattcaattaactctctatcgggatggtaagagagtgtatcttctatatcctttatttctttatatctatgtccgtagaaaaaggctcggcctctccgtatcgtatccttctgtaggatatattttaaagaaacgttctgttccaccatggaacgctgaataacctccacagaatcaaataatttattgtcaatcaacagttgaatagaccgtgctttttcaaccatactgctatataaagtaacaatggaaatatcatgtatttccattgcattctcatcattaaatgtcttttcaactattgcgtacaagatttcatcatatgaatccaaatcactcttaacaaccatgctcattcacctcatttatctcaaggttaatgatactcaattgtttccaacaaagcaaaaaagtcccgccataattggcgagacccacgcgatgtttgttgacttactatttcttcgggattatcccctcaactggataccccatattaccatattaacacggtcatataggcataatgtgcgcacgatttgggcacgattcactttttagctaagatatcatttaacgcgtccatgccgtaaagcattacgcttaattcgtcgataccacggcgtttatcacggtcaattgttgagcggtctttatcataaaagatggcaatctcactcaaactaaaacgctgtgtggataagtacaatttgtcaatgacctgataccgacgccaatccgcttcatccccctgcttgcattcatctttgtaggcagcaaggatactatctaaatattttagtagcgctcttgattttgcgtgatacttattaagttcatcgaaccggataattacgccgttttcagcttcatatttcaaagttaactcctcatccccaggttcgatttggatatgtcttcctaaacggtgatagttctgtaataacattttagtgttccgaagtcgacgatcaccttccttcttttttgatttgcgttgttcccttaacacaacgttggtgattacttccaattgctcattattaattccttttaaatcaattcccacataatcaactccaattacgcaatcacgatcacatgacccgtttcgatttcttcatccaaatttcttgttaaaaagtctttgacgttgctcatagcttcgagtttccaggcaccaccatcagcttcgaagatggcactcttcatcccttcacgcatacggaacacgaagttactagttggctgcgtgacttcattgaatgtccggtatggtgccaagccaactggatttggcactttaacttgatcaacggatgcaacaccagttttaattgtgacggcttggctcacgccatcatcactggcgtaatgaaggtcaaatcaatcgtgaccttccgttttgttttggactcagtatttaaatctaaaatgttatcggcgaccttttgcaattcagtggtgaatttctcctgtgcgccaccatctgcaatttttgataaatcgaaattaaaaagttgttcaaccatagtgctatctccatttcttattaggtttgtgccatttttgatatgaggtcatgtccaagtgcttttcagcgtaagtaagacgaattctcgttccaccaagcatctttttaattgcttcaagctgcttggcaaagtcgacggtactgataccaatttcaactctatcgatatgagtttgagcggtatcttgatgatctaccgaagtatctttgcgcccgccgcttagcagcgacttcattttgtttttgaatctctctagcatctaattgttcctccattcgattagtggcttgttccaataaatcaacggcctcttttcttgaacaacgcaggtgccgcataagcgcttctggcgtgatgcgttgcccagccattaagtgttctgataaaacttgaactctcgtatcaatcattaccatgtctcctttcgataaatgaataggcctgataaaacagataagatgatacatcccatgattaatttaacgattgggatgccagcggtgacgaggaataaaatgatatagatcattgggatgcctccagtttattgccacacaccggacagtaattaatcattttaatgaaagtgccatcctcacaagttaactttagaaaattatcttgaatagctacttctaaatctggctcatgatcctcaatttcatcccaatcttcgattaatgttatttctccagaacaatagttacatttagctattagcgttccctctcttatcccaatgtagatacataaattcatcacattcaaatacggccattaaaaacatagccaatacccatgccatattgctgctaattccaaagaatcttgtcattaaccagtgctctagtaacaacaaaaagaaatttagaatatttgctacatacaactgtctagacgtaattttccccataaaataattcctcctaatcctcttacataaataccgctaaaatttaaagtattgaatcccatcagcgataaatatttctgcaagtaattgttcaaattcagcgttctttaattcaaaatgagcttgcatatcacgcaggtcattcgcgccctctaaccaatcagttagtaaatggtcgagttcagattggcaagtgtcatctccacatctaggttcaacggcaccgttatatccgtagtcactcacgcaatctacgagatcagcgtatttctcttcaagttgaataataatgggtttcataattatcgttcctccaaatatttatttaaattgttaaatcacttctttaagtctgaatctaggtttgattcaatcaaataaactcatctgaccatcacttttaataaacggccttatttcgcgttcaaaatcatcttccggcagttcataccagcttgtttcagattcacctagataggttagtccgtggtttttgacccgtttagattggtcgcgcatgaaagatgcatcatcgctcttgctgtaccagccgtaacgatcaccacgcaagtagatgaaccagcacccatcagttactcggaataatgaatacttataatcgttgatgcagaacacgcgattgttatctatcttcaattaatgcacctccaaacatttgattattaatgcataattggccaatatgaactaatcatcaaacgtttatatcgacctcacaaatattggtctgccaaattctaatactgtccaacatccctcgacctggtccaattgtttatcgacaccgttcaatgaatcgcaatcggcttgtgccaaaacgatatcgttatataaaaataagctgtattctcgaatcacatgatcttgaacccgaccaatgcaataagcgcgtggtactttaatttctggtattgtcatcactaatcctcctcatcccttgttaatccgtaacgatataaatcaaaagcatagtcgctaaataaaaaggtactttgattaattgcttgaatgtcatctattaatcctccccactcggcgccacatcttcaaatagatgtgccagccagtttcttcgtagtatttcgcttcgacttcactaatatcgtattcgggatatttcttagtaaagtaggtcattccctgatcaggtgtctgtgcaattttttcaagagttcgtgggccatacttatgatcatttggtctagagactgggcgtttcaaattacgggatgatgaccagcgctttctacctttagggtccttgctcatatatgtcataattccttctaatccattttcatttgtttgaatatacttagcattgactgtcccaattcgttctcttttctggccttttggtttcttagaccataaagcttcaacatcatccctggttaagccttcatctagactatttatcacaagatggtggttaaagcgaactgtcttggacccaccttcattaactaagatatatttgagttcctgacctaacttcttatatctggctttcaatcgacggatatagttaccgacttctttttctgcctgttccatagtctctggttggaatttatcttggtagctcaggctaatgaaccaatcaccatcagaaaagttaccattacccaactgtctgagatagcgcttggcatttttctcgttcaagttgcgctgctttggagccgactctctctttttcttggatcgtgtccctcgtttagcaaccatatccgcttcccaagttcttggaatgatatcgacctctacataacttggcccacagtatatttttttctcccgcacaaacctcatttgattacacccacttttaaaacgtcgttaagttaatacaacatacaagcacgctataagccgccctcttacttgttgacttcaacgccttaacagcggtataattcagttatcggatgaattattgaagtcttgactcgtgagagttgaggcctttttttgtgcttaaattttgattaaaactcatcattattaatactcagttcataacgatcactaatcatttttttaaccgattgaacgtcggtgttgctgccataataattaatgcgaattggccgatcgtcatcgctggcaaaaccaccaacttcgatattaggtgccatgccgaatagactttggatatctctttgaatctgtgtcgctaccatttgggcatattctgctttcgaccagactgaaaaggtctgcggcttttttaatttatcgttcattttaaaaacctccattaattaattgtttgaaaaacgttgctgctgtttaagcgtttaattgacattctcaactcggtgtcaggcaaccagttctcgataaactcaagcccatcatcaaacttggcttggggtaagtcactgtatcggggaatgctaaacgcttgtttgaagtcgcgccacaattggctgaaggctttagcgctgaaatgctgataagcagctgatttcttaccccctaaaatgctaacgacttgctggcgaccgtgtgactgcagcgtgaattgattagctgatgtaatgcgcatgttatcttttaacatgttgacatccgacttaattttcttctgctcctgtagctggttgatcatcatgtcttccattgacatcggcaagtccttagcttgtttttccatctcaatgaaatactggcgggccatcttaccaacttctgtgcgctgaatcatggaaacctctttagccatgtcgattgtcatcgcgtattcgatacgtgggcgaccaccagaacttttccccgaaattggggaaaagtccgtttcctctgtaaatccgtatgccaccatatctttgaaccaggtcgagaagtctttaccgactttcaagaagcgatgcaagtcgcgaccactgacaaccgtctggccatcgttattttgaaacgtctgaatcagttcgttcattgtcgtcgcctcctttaaaaaattctttgtaattaacaccgataaaagtgatgactgagctcatgattattactgtcacgataaattgcatgtctttaggaatatagagacctaaaacaatgctgatcataactgctagatagaaattcttattcattttgatttcaactccttcataattcttgggaagttgttccgcaagaattgcgtaaattttaatgattcgattctgtatttaccgccggcgtatggatagaaaacacacccgccattatcaatatcgagttgttttttaaacacctgcaggattttagtcatatccacacgagtgtatccggaaacctcgcaggctttgtttaaatcccaaataatctgttgatcagcttctaatcgctctctgtcttcagtggcaattaactccatgccagctggtaattcgatagtgaactgtgggacgatgactttagtacgttccattgttttacctcctgtaatagacaattgatgtcagtcattaaatcgcaactaaacctttaatcgaatagttttatctctttaccatctacaagcgtatagatactacttctatatgcttgtatttttttatcctttgaaataaatgacagcatatccatgaagtcccctgaatgttgggcgataaatatattgtcgttattttgcttcctataaataatgaatgaattctgcatccctaaatcacctccactattagtaacgtagtaatcccttgaaatggaaaaagaaattttgttaactttaatgagtttcctgtttatcactaagtaactcgttcatatcaacttccaagtaatcggccactttttttaggttagtagctgaaggttcttgattagcagttttcccccactttgcaattatcccgttagcaatttttgtatcacgctcaatgcggtaaattgtcacaccttttgcatctgcaattcgttttacattctcataaatcaaaatatcccctccttttatagaaatacatctaataaccattgacatatattagatagttggctatcattaaggcataataaataagcacattaatacccactgattatttagtgagatgtgctgttatgctatttgtaccctctcataagtacacacttagtataatagccgtttatctaattgtcaatagctaggtatctattttgtgtaaactctttggaggataccagatgacaaatacgaaagaaagagtcaaagagctcgctagtgaccaccacatcacgatagccgagcttgaaagaactctaaaaatcgctaacggtactattggaaaatgggataaacaaaatccatccatcgaaccactcacaaagattgctgattactttgacgtaacaactgattatctattaggtagaaatcaaacgcctaaagatgcaactgaaaaagagtctaaagaattaaaaaatattattaataatgaagccggccttacctactctgaagaatcagtaacacctgaagaccgtgcggcaattgatagcatgattgcggcttactattggaacaaagggcgccatagaatatttgatgatgatcagaaaaaggagtgatctagatggccgtatttaaggattcatctgacctccaacaatatttgattaatcataatttattcgactatcaaaagctgataaatgaattcgatatcgatattgttagaactaatgaaatgccagaaacacttctcggacttgctgtgccacgaactagaacgatatttattaatagtgcgccatcacctgttggtgaaactttcgtattgatacatgaattaacacacgtgttaatgggagttgaatcagctgcgttttataaaagtagctatgtttcaacgcgtaaaaatgaagtggtcgctaacaacggcgcattctttatcctggttagagagtttataaatcaatggagtattgataagttgcattttaatgtcaatacttttatggactactatcgtattccacttatgtattactttcaaattgaagcattcgtcgctcagcacgtagacgaaatcttcgcataaaaaaagcgccctacttcgtggggaagtaagacgcaaaaagttgctccgataaaaataaaaaaagcaacaaccatgtgtatattttaacatatttggaggagatatccatggggaataatcaagaatggtctgtaattgggcaacgactatttcaaaatggaacagaattatattgcggtaattgtcaattcaaactatatggtcagcgctactgcccaaactgcggtgcaaaaataaaatacgtaggcgaaacagatgataatacctatacagtttcaacgtcatctacattagataaagttgcgtcggttagtaattcaatgcaaaaaactggtgatgccatgtcaaaagctggatctggacttatacttggatgtacaataccaattttgcttctaattattattttattactactttaattttaaaacactcgataaccattattccaatacaaccaaaataaggagactatttcatggattatttaatatcatcgatggataacggaagaaatccgaaatttatttgtccacattgcagtttacgagctgcacatgacgttgaaggaacaattatttcagataaatttgatgaagatcacaatagctcattaactactatatacaaaactacatgctacgcttgtaataaagatgcatatattctacaacactcaattgtttatagccgagaatctaccaccaattttagtgactctgaactattatggaaaggagaacacagaaatacggttgtcggcccaagcattccgtcaggagtcgaagtaattatttcccaaaaagttgtcgaacctgataatttcgttgatgtacccagtccaaatttagatttatctgaagatacgacaaagctatataatgaagctgcagcggttttagaaaaatctccgagagctacggtagctctcctacgagttacttttgaaacattcctacgaaatgatttacaactccaaggtaagtcaataaatgatatgcttggtaacctctattcatccggtatccctaaacaaatggatgacgcactacattttgtaagaattgcaggtaacgctgcagaccacactaatccaggtgaaattcgtttagatggtgaagatggtatcgagacagcaaagacgcttttcgaaatcattaactatgtagcgaatgaacagattacgcagaagaaaaagctaactggcctaacgaagtatttcaccccaggtcaacaagccgcaattgagcgtcttcacgataagcacaaataataagcacatctcccgcggtataaataaattgaattggagtgatactaaatgattaaattaaagaaaagaatacagattataaaaataataagtcgaaccgaagtaataattaacgctggtagtagagaaggtatcaaagtaggagatgctttcaacattgtagacactcaaaatggcacccttaaggatccttttaccgatgaagtactaggtcatatagaaatatataagaataaattaaaagcacaacagatatttgagaaatattctattctatcaacgcttaattcctcaatcaaaactgaattaatgatacgagaatctatcggatttattaataataaagaacaattaaacgttgataagaatgatatacaaaaaattgatagttgttactcacattctagagtaatggttggagacagagtaattcatatataaaaatttgtaatcaacttgacttacattcttaactaaactatacttatgccaatgagaggtagactgtgagcctactagattaaccccctttggcataagttgagggggttttttgtttggataattttgatgattcaattctattaccacaatctttagaattcgataaaccatttatttcttttgatttacagctaaaacgcttaaaacgtagaggaatgatatttgatgaggattcagaagagtatgcacggtatatttttaaaaaatatggttactatcgagtaataaacggatatgacactttatttaaagatccgtcctctgttgaaaagaaatatcttgaaggtactcgttttgaagatgttttcaatctatttattttagataatgaacttactaaaattctatttcaacaattcacagatattgaagcccatttcaagaatattactgcttactacgtttcacaacactttggtgtcaataactactatcctgatgatagggataatccttcccactcacataattcagaagtgaaatcatatttagacatttctttctaccccaatcaatccagtagttcattaaataccctgcactatttaagtttaaaaagccctgataacccaacaaaaatatataggaaatcacgaaatcatattccaccatggatcttattttccaacgcatatctcggaacaatgaatagatatttctcaatcttaccaaatcatataaaagatgaaattttagatgaaattttaaagcctacccttattagttcagcaccggcattgggcttagatatccatagtattttcttcgatggtatggaacttctacgggagtttcgcaattgtatagctcatggatctcgaacttatctcttccaatccaataaccattttttacctaataatctacaaaaattagttagtccagatagtaatatattaacttctagaagagaatattctcaaggggttggaaaaaatgatctatatgcaatcatcatttggctgtttcttttcacttctagtaagcctgaagcggacttactgcttaaaacattcaattctttttttgatgaagtaaataatttattaactgatgatccttcaaattatgataattcattttttaaaacatcaaaacttcctattaatatccttgagagattgcagaacttaatatctagttatcaccaataaaaaagcacatcccctcccgccaagaagttggatgtgcttcacagaaataacgcaaaatattgtgcgctatttgcgtactctattttagcttaaaatggaggttttaacaatggcacaaatttttaaacgtaatggtacttggggttatcgagtttcaattgacagaacacacaacaagcaaaagagtggtttcaagaaaaaatcagatgccatagcagctgcacaagaacttgaactaatgaagaatgctggcaccctggttactgtcactgatgcaacctttgctggttacttcgagaaatgggctaagacctataagattggtcgtttacatcaaacaaccgaatcaaaatataaagtggccatcaagctggttgaaatgaatttcggaaacgttaaattaaggaaagttaaatccgctgattatcagaggatgttagatcaatacgctgaaacgcacgttaaggatagcacgcgattactgaatagctattttagaaatgccgtcaagtatgctattaacgatggcctactcacacgtgattttacctttggcgcattaattactggtttagaatctaaagacagcagcttgaagtttttggagtacgacgaagcagaacgattaaaaaaactatgtatcgaaactggctcttttatggcggtcactagaattgaaatactatttggtttactaacaggctgtcggtacggcgaagttgccggcttaacttgggattgtgtggactttgaagctcgcaccatcacgatcaataaggcctatgattataaaactcgaaaaggtttcactaaaacaaaaacgatcacatcgaatcgaacaatatcaatcacaccgcaacttgctaaaattctaaagtcgctccaggttcagcaacggagtcaatttttaaaacaaggatttaaaaacaacctgggttttgtcttcatgacaaaccgccacgaaattcctagcgatactgcagctaacaaaacgcttaaaaaaatactacttgaactgaagactaaaaacgtcatcacctttcatggcttacgtcatacacatgcttccatgctcattgccaaaggtgtctcaattgattatatttctgaacgcctcggccatgcaaatacaagcgtaacttatgaagtctatacgcatcttctacaaacaagtcgagaacgtgaagatgaaaaagcactcaaaattttgagtaatctatagatttcgacgtgcagatttcgtgcagaaaatgcagaaaaagtgcagagaattcaaaaaagaatacctaaagtttgacctacctcatcttccgaaaaccccttttatatcagcactttaggcatattgttaacgccagtttctactaggtttgattatggtttaaattcccgggtgacgcatatatagatcggttaaacctactgactggatgttagtaggtttttttgttccataatgactatagcttttttcacttcctaatatcaaacaaaaaatgaatacgggtagtcattgcgtccgtaagataagagtagccccatgctccacctaaaaaagccttaccatcatcgccaacataatattaaacatgagtgtgtgcagatgactacacggtttttagatagctggtattttcccaggtccttgattcggtaccgacatcatttaagataatgtagttgttgctgttcttgtacacagagccctaattgtcggaaatttgggtacaaaaatagcatcccaattttaactaagatgccagttagctcttattcgattttaagttctccggtaaatcctgttcatcaaacggcgtaccgaaccattgtatatgaagatcgttcaaaaatttagcacgttttgccttctcttcttccgataaaccttgctctgaaatatccggttgatttaggtctgcgtcatgccaccgcgcatcactatatttttctttagtcacgttctgtcacctcaataattggtttgcctgatttatccaagtaataatcgtttacttggatagccgtatctcatttatataatacttctttttcggtatcattaataccttttaagtcggcgccactgtgacttttttaataacgattcgcgcactatcatcctctacggaatacacttctttacttgcagagacatagcctttatcagaataccaccatcattaatgattcgtcggagaaacttgtgcgcatcttctctacctaaaaatgtgaatgacggatataaccgattagcaccattatatttcgtcagcttatcagtcccagaatctaacttgccaaacctgggagcatactctactgaggttgttacctgttgcactgaaatgctctaagtatcgcagtcgttcaacctgcgctctgtagtcctcaatcgtgccacctttaacaataaagttgttcactcttttctcctgtgcctgaagcttatcagggatatcattgagcggtctcatgtgctacctcctaattaaagacaacaaaaaagcgcacccgattggatgtgccttacttgcaaacttctatgctattactataaaccgcccgaatcaataaaaccatacactttgtgaggtctcataaaagtcacattgattattcaccacgtttagccttttcccactcacgtttaaagtaaatagctgaatgctctaaaagatcatcgatctccttcattctactttccatatcatatatatatccttcgttatattcttcatcagtcaataagtcctgataattatttatctctctgtcaatcttcataatattttccagcaattttgtttccatagtatcatcattccgaaatagattaagtgtaattagggctgtgctcttggatgcatcgatagtacttacatctaggttctcttgatttttgtttatttgatcaacaccccaatctctcaactttccatctttagtttcatctttatgataacgaaacattaactctaacgtaaccaatcttgtctgctgcgctaaacagtataaagtgatgtgatcttttaacctttctagccactttattcgattcttggaaactaaatcagctttcaactttcgacgactatcccacgcagtaaatgttaacgatataatagccaaaacagatgtaatgccaatccaattaaacttattgtcattatctacaaagaaatgattaaagaatctaagatgccacactttatacccatacatggctcctatgatggaattacggacaaactgttcgatataatacatcataaaggagctttttattatggcaattaaatattcaaatgaatttaaagaatcgattgttagcttaagtcagactggccgttcggccaactcactggctaaagaatacaacgtcagtgtttcaacggtcactatgtggattaaacaagctgatcctaacaacactaaagtgctatcatcaaatgaacgtgctctgattaaagaaaataaacggttaaaagaagaacttgatattttaaaacgagcggcggtgctcatggcaaaaagctaattattaaagggcgtgccctcgtgttagaagtcgtcaacgctaatttacttgctgggcaccgcattacgcgtatcttatcagtactcaaaattccgcgctcaacctactatgattatctacattggcagccaagtagaactgaacgccgccagcatttaattaaacaagaagtgttaacggcttggttaagatatccaatgtatggctacccacgattaacgatcttactaaatcaacagtctgatattcacgttagtcagcgtctggtctatcaacaaatgtgtgaattagggattagatctagaatggttaaacgaatcaataagccaaccactcagactgattatgatcagcgaccaaccttgattaagcagttaactgatcaatctggtattttattgactgatattacgtacattccccttaaccatacttggtgttacctagctagtgtctataatccagtaacccgacgggttattgcttaccaacttaatacgcagatgactaaagaactagcgactaacgttattacccaagtcatggcgcaagcagttaaaccacaaattattcatagtgatatgggaagccaatacacaagtgacttatttgaaaacactttatcgaagtatggtatcaagcattcttactcccgaaagggtcagcccggcgataacgcgcgaattgaaagttttcattcaattttgaaacgtgaatacgttaatttccaagattttaagacaattcatgaagcaatcgccggaattgataactatattcgttggtataacagtgatcgtatttcacttgtagcgtagctacaggctattaaattcaataatgttggggcttatttaatatactctaaagcgtttttaaaatctgaacggggctaaaacttcggccaccgaaaattaaattaagtaatttaaattgaaagtcaaatttgttcgtacttttatgtccggattcttgacataggagccaacagatgaataaaaatattgaagaaattgaaagaaagcagaaaaagttaaaccaactattgtcgtcagatagtgatgaaagctgggtgttattactatttactgttttttcaatagctatagcaccattcggattaattgctattccattagttttatggcgaaataaaaaagataaccaattctataagttgattatctttttagcagtgttgattattatttataacatttatattttacagcttggcattacaagtagtttagatataggaactactgtgaatgtccaataagaattattcaaccactaatttattgtttctaatagttgctttgacagtcaaatttgaagcgtaagctcgatgtttccatgttcctttagcacttgctgaagaattagaatgtctagtgaccgttgtgtttgagaagctaccttgtgcagctttaaaacttccactatgagcagaagtaagttgattatttttaacagaaactttgtaagaaatcgaccaagaattctttttatttttagaaacagtataagttttatcagctagtctaaaaggctgaattattttgtaatctaggttttgcaaaagagaatcgtcaatgatagtaactgaaacgatgtttccatcttcttctaactcgaaagattcaatcgactgatggttacttaaatcataaataacttcttcattatttgctgaagcaagattagaacctaatacaaaactaccacctaaaatgataaaactgattgctacttttttcataaaaattcctcctaaataaataatataagccaaatatacggaaattttatttgtttagggagcaatcagtcgtttgcatttagcactcattgagtgcttttttctttaaaggttaacataatgtggcattatatctagttgttttgttgatgtataattaggaaaaggagtgaattttttatgtttgataaaagcgaaaaaatctttaaatgcaatcgttgcagtaaaaaaattgaatcagctgaaaaatgttggactaaatggcaatttcctccaaaagctaattcatttcaagataaatctataaaagcattggaatatcaaaatgccccaattctttgtttagaatgtgctgatgagataatgaccgagaaattttagttatttaacttcttagttcacataatctgatgttataccaagttccagtgttaccagtcgattcagacactgacattgtgagtctcaaaaggtctacctcaaaattaaaaaagaagccttatttctagggcttctttttttctgaagatagtgaaatttgaaaaagagattttagagaatatgttattaaaattcaaaaggcaagcatcgggtttccacgtggagaacccaaaaacgacttgttaggttttacctaagaccaataaaaataccaggataaaggatcttcatgctgaagaacttttatcctggtatttgtttgtcgctgcactcgattaaattgggttgttagggcttgtcctaaccgtctgaaagacgcttaatgtcatttagttaagagtttcatcagtaggcaacgtcggtttatctttttcgttctctatcacatctatactaaatttatttaaatgagtgggttgaccttgtttctttttttgaatttctttttctaataagtttaaattctcaataaggcttaatgtcatttgttagacctcccgatttttatatagggcgcacttatacgcaccaaaattttttggtgtctatcgtgctaaaaaagagagaagatcagacatgaacttctctcttttttcgtcaagcgtgtgggttaaaattcgctacgctcatgtaaaagatagagtgaagcgatacttaatttaaaaagcctttttgtaaatcatctagcagtccttttttttgaatttcagataataaatcttgttctttcttttcaagttctgcttttgaatcagcttcatgagtaccaatttttaatcctaaaactttatctttagcaacccatttttcttcttgagaaagttctccattgtgttcaatgttaaacatcttttggctcctatgatggaattacggacaaactgttcgatataatacatcataaaggagctttttattatggcaattaaatattcaaatgaatttaaagaatcgattgttagcttaagtcagactggccgttcggccaactcactggctaaagaatacaacgtcagtgtttcaacggtcactatgtggattaaacaagctgatcctaacaacactaaagtgctatcatcaaatgaacgtgctctgattaaagaaaataaacggttaaaagaagaacttgatattttaaaacgagcggcggtgctcatggcaaaaagctaattattaaagggcgtgccctcgtgttagaagtcgtcaacgctaatttacttgctgggcaccgcattacgcgtatcttatcagtactcaaaattccgcgctcaacctactatgattatctacattggcagccaagtagaactgaacgccgccagcatttaattaaacaagaagtgttaacggcttggttaagatatccaatgtatggctacccacgattaacgatcttactaaatcaacagtctgatattcacgttagtcagcgtctggtctatcaacaaatgtgtgaattagggattagatctagaatggttaaacgaatcaataagccaaccactcagactgattatgatcagcgaccaaacttgattaagcagttaactgatcaatctggtattttattgactgatattacgtacattccccttaaccatacttggtgttacctagctagtgtctataatccagtaacccgacgggttattgcttaccaacttaatacgcagatgactaaagaactagcgactaacgttattacccaagtcatggcgcaagcagttaaaccacaaattattcatagtgatatgggaagccaatacacaagtgacttatttgaaaacactttatcgaagtatggtatcaagcattcttactcccgaaagggtcagcccggcgataacgcgcgaattgaaagttttcattcaattttgaaacgtgaatacgttaatttccaagattttaagacaattcatgaagcaatcgccggaattgataactatattcgttggtataacagtgatcgtatttcacttgtagcgtagctacaggctattaaattcaataatgttggggcttatttaatatactctaaagcgtttttaaaatctgaacggggctaaaacttcggccaccgaaaattaaattaagtaatttaaattgaaagtcaaatttgttcgtacttttatgtccggattcttgacataggagccctaactttttcagatttttttaatttcaaattgttaatcccccaacaaaaatagacttaccatcagtaagtctaccgtaactggtcgccgacaacaacttgcaattagtacttgtcagcatcccatttatctaaaaaatctaacctgcggtgtagctcggcgtgtttcttgcggatacaagacagcgtgtagtgtacctcgttgtcctctgcaatctcttccagtgtctgcccatcaatgtacttcttacggagtatttgctcctcaatgccattaaatgaacttacaagctctctcaaatcatgttgagcctggacacgccaaggaaaatggcacaatttctaatcacaccgtcggcaaacaaattgaagaaccttcaaacattcggttgattcttgaaaatgttgaaacgcaagaatctgtcattgtcggcgtcactggtaaacaaacgggattccaaaaattactaaacctctaagcacctataatggctgctcatggacaagaacctgttgcagtctcagaagatgatgatacctcacaaatcgatagcatagctaggccaaagcattggttgataaagggattctcacacaagatgaattcgatctaagaggaaacagatattaggaacctaatataattcaaataattattactaagtttgtactcatacttaattaaaggattgtcatgttactgacagtcctttttgttgtacaattatctcattacgagtccaattgaggagcacccattcaatgcagtattttaaaaccctatttacaacaagtacattcacttttttaaagcagtcccaggcctattttcgtagtgtgttattgatgcatggctttttgcttttaatttgtctaccgcttttgagtaaagccagctacttcattctggtacataatcagatccagtttctcgcgttgagcaacttgccagcgctcattcatcagcatccgattgcgctgttagcactcgtaggaattgcgctactaattttattgctggctttcttcgaattcacgtttcttctattaagtgtgtactttattcagattaaacggccgctggctttgcaggcattgctgaaaatgactttcgcacaaattacacatctacacatcgggaccgtttttttctttctatattattatgttttaattattcctttaggcggtttaggttatcattctgacttattgacaaaatttaaattaccggcattcattctggattacatcataacaaatcgccgactaattgctattttatgccttctcacttacttaggcttattgtatgtcggattacgcttgatttttactttacctaatattatcttgcaacaaatgcctttaaaaaaggcgctgcgcacgagttggcatttcacgcatcaccaattggcacgcctagtcggtcggcttttgctcattgcaggtattctcgttggcttcaccgggatcagttttttcctattaattcagttgcaagccttcattgagactcacacttcggccggcttttccagcgcagtcctcctaatgacccttttacaagctgtcctactcattaatctggtcctctcgacagtcgccatctttttcgttgttgttgactacttgctaaccgatccacaatttaatcggcccgttgtcaattatgccagtttaaaactaagtgttcctctcagtagtagcttattaatgttagtcgcaacaatcgccttagtcggtgcaggtttttataattgggattaccttcgttccgtgtcaatccagcaaccactgagcatctcacatcgtggtctttcccaaaaaaatggcgttcagaattcacttgcagcgctcatccaaacgtacgatttgaaaccaaattatgtggaaatggatgtgcaactcaccagagatcatcaattcgtcgttttccacgatttccaacttgccccactcactgggcactcagggaccccgcagtctaaaacactggcgcaactgactaaaatgaccgtccatgaacatcggcaatccgcaccaattgcttcatttgatgactatcttgcacgcgccaatcagcttcatcaaaaactactgattgaaattaagacacccaccaccgataatcccggcttggtgcaacatttcctgaataagtatcaggccaatatcgaagctcacggtcacatggtgcaatccttaaactggcacatcgtcgaggccgttaaaaaggcagcaccgaagattcaaacgggctacattctcccctttaattttatcggcccaccaatttcgaacgctgatttttatgccgttgaaatgacaactgtcaacagtcacttcattcaagctgcacatcaggaaaataaggccgtctttgtctggacacccaatgatcaacaagccgtccaacgcatgatgtatttcggtgcagacggcgtggtcaccgacaatctcaccgcggataagcaagctaaacaacaaaataaccaacgacactacgccgataaactcgcatattatgtgatcggtattgggtaatatagtaaaaaaggattgggaatcgatatttttatcgatccccaatccttttttattagcgattctttctaagccaacgtcttacacttgaatagccaagcgtaagccccgttaagagcaatacaccagctgaatacacgaatccaatgacaatcaccgtcttcatcaagcctatttggcgaaccatgtcagcacaaaaagcttgtgttgctgcccatttttttcctaacttataaacgagcaggatattaaccacaaaaaagtggcaatcagatcctgcttgaatttttctgacatctttaacgccccaatgtgtcttattgctgttcattataacaatggcttttgcaaaagaaaaggtcacaaaaaagcagccatcaatcttcaattgacagctgcttgcactttatttgtctaaaagtcgttgtgctttttgggcggcgacgttcatgatgttccaaggacggtcaaaacctggttggaagaagaagtcagcatatgctaaatcatcgattgtcatcttaccttgaatggcaagtgaaatggcgttgatgtttgccgttacgtcagctttagacatgatttgcgcaccgagtacacgccgtgtttctggatcaaaggttaatttgaaatcgaccactggattttctgcttcagggacgaagtgtgggcgatatgtttcagaaaccaaaacagattgggtcttcacacccattttatcagccgttccttctttaatcccagttgaagcaaagtgataatcgaagacgctcaatgctgatgaacctgaaacagcgggtaccggttggttggcggtgactaagttcttagcagcatagcgaccttggcgacgcgcattcgttgctaaagcaattggcatttctttgccagttggtgcgtatttcacaaccgttgcatccccgactgcaaaaatatcgggttggcttgtttgtaagaattcattgatttcaatccggccgctgcggtcgagttgtaatgtatcttttaaccagcctgtgttaggccgaatcccagcagcttcgatgactaagtcagcatcgtattcagcttgatcggtcacaactttagttagcttaccgtcaacgccgacatattctttgacgccttgaccaactgcaggatagatattgtgcgcttgcatttcagccgttaattgatctgtaaattcttgatcgagatagagacttaatagacgtggcaagacatcaacaactgtaacatgtttgccagctttagcaaatgcttcagccgcttcaatgccaatataaccagaaccgatcaccacaacatttttaacggttggatcaactgtcctcgcctttaatttaatcgcccaatcacggccacgcattgcgtagacattctctaaatcacggcctggcactggtaattcaaatggcacagcgccgacactcaagactaacttatcgtaactttcttcacgcgttgtattattctttaaatccttcacttggaccgtatgttgatcggcgttaatcgcggtgattgcttgttgtaggttaacttcaaccccttttgcccgcatgccttctggtgtcgcataactgacatcattaacgtttttgacggtcccttctaaatagagttgcatcccgcaggataagaacgataggaaatcgccttgttcgtaccattggatggttgcatccggataatcgagtaaactttcttgaacagtttcaaatccaccatgagatgaaccgacaacgataattttcacattgatcactccttattctatgttacacaaaccaagtataacgcagatgatattaattacaaataaaaacgcattctcggatgactttcaactgaccattcttaaattccatgctagaatagtgacaagctttacattaaaaaacaatggagattgctatggcctttaccaaacaaaacttccccacttttatctatctagcaacactttatctcacctatcagattctaaatactttgattcgcatctttaccagtaacgatattctcgtctacgccaaagaatcattaactattttcatcgttttcttcggtattttctatttctcatatatattgttcggcgttggcttattatacgctggccacgtcatttcgaaacaatcgggcaactacgaaatttcactcatgattttaaacatcctcaccacttttagtacccttaccacgattattttaaaattttctggggcgcagatgccgcgtttcttactttcaaccacttttttcatcattttgatcaccatctcattagccacaacttccaaactgctacaactgcgcaccaagcgaattgacaataagtgactgccaaaggtgaagtagcgtctttttatgttaaggagacatttttcatgaacggtaaaattgattactaccaactctttcaaacaatgtatcggcaatatgggccgcaacactggtggccttctgattcccattgggaaacaatggttggcgcggttctagttcaaaatacaaactggcaaaatgttgaccgctcgctcgccaatctacgatcaagtacgcacttcgagccaaacaatctgctttctctttcggatgaagcccttatgttggctattaaacccagcggcttcaataacgctaaaagcaggacaattaaagggctgtttcgatttttagcgacagttgattttgacttagacacgctcaatcagatgacaaccaccactgacctacggcgccagttacttgccatcaaaggcattggtccggaaacagccgatgtcattttattatatgtcttcgaccgcccagtctttatcgctgatttatatgcccgccgcttaattgctcacctagagcactgttctttaaaagacctccactatttaaaggtacaacaggttattgaaccacagctcttaccccaaatgactgttaaagactgccaagaatttcacgccctaattgacgatcatggtccagactttcttgcagcacaaaaataagccgacatccgtttttagacggatgccggctttttaattatccaacaacccctttgcttgtatcagctgggtggaagagttggtcaataatacccgaaacgcaggttaaatcaacattcccgcctgaaactaaagccacaatatttttatctgttaaccattgaggatcaattttaccactcagcagtgctgccgttggtaatgcaccagcgccttctgtgacaatcttagtccgttgcatgagatccttcatcgcagttgcgatttctttttcggaaactaaaatcatttcatcgactagattttgaaccactgggaaagtcagttcacctggaatcgcaacgtctgtcccatcggctagcgtgaagtccgcatgatggctggtgattgtgcctgcttcaaatgaagccgtcatcccgtgcacgttttccgattgaaccccaatgatgtgaattgaggggttaaaggatttcaaagccgtcgcaatgccggagattaagccaccaccgccaaccggtacaatcaccgtatcaacattccaaatcgcatccaaaatctcaaggccgattgtcccttggccggccatgacttcgcgatcgtcgtaggggtggacaattgttaagcccttttcggctgctaactgctccatgtacaaccgcgaatcattaaaagtcgtaccatgtaaaacaacgttcgcaccataaccggcggtcgcttgttgcttagcaagcggtgcttcttctggcatcacaacggtcgcatcaatccctaataacttcgcggtcaatgcaaccccttgcgcatgattgccggctgaagctgtaatgatgcctttagcccgttgctctggcgttaaatggttaattttattgttcgcaccacggaatttaaacgatcccgtcagctgcatattttccaatttcaaatagacatgaccgtgcgccacattacgactcaagaacatcgattgaattaaaggtgtttcgcgaatatacggtttaatggttgcccgtgcttcctcaatatcccggatatcgcaaatgtctgcggtttttaatactaattgattcgttgccattctggccacctcttccatttgaattgacacaaatgtctgcggataggttgtgctatcattcacaattaaatgtaagccacttatcaagcattgtcaaaacaaaacggtcttaaattagaacgctttcatttggtggttattaagttctcattctagttgtttaaccagcaagatagcactaaaatagccatgggctcctatgtcaagaatccggacataaaagtacgaacaaatttgactttcaatttaaattacttaatttaattttcggaggccgaagttttagtcccgttcagattttaaaaacgctttagagtatattaaataagccccaacattattgaatttaatagcctgtagctacgctacaagtgaaatacgatcactgttataccaacgaatatagttatcaattccggcgattgcttcatgaattgtcttaaaatcttggaaattaacgtattcacgtttcaaaattgaatgaaaactttcaattcgcgcgttatcgccgggctgaccctttcgggagtaagaatgcttgataccatacttcgataaagtgttttcaaataagtcacttgtgtattggcttcccatatcactatgaataatttatggtttaactgcttgcgccatgacttgggtaataacgttagtcgctagttctttagtcatctgcgtattaagttggtaagcaataacccgtcgggttactggattatagacactagctaggtaacaccaagtatggttaaggggaatgtacgtaatatcagtcaataaaataccagattaatcagttaactgcttaatcaagtttggtcgctgatcataatcagtctgagtggttggcttattgattcgtttaaccattctagatctaatccctaattcacacatttgttgatagaccagacgctgactaacgtgaatatcagactgttgatttagtaagatcgttaatcttgggtagccatacattggatatcttaaccaagccgttaacacttcttgtttaattaaatgccggcggcgttcagttctacttggctgccaatgtagataatcatagtaggttgagcgcggaattttgagtactgataagatacgcgtaatgcggtgcccagcaagtaaattagcgttgacgacttctaacacgagggcacgccctttaataattagctttttgccatgagcaccgccgctcgttttaaaatatcaagttcttcttttaaccgtttattttctttaatcagagcacgttcatttgatgatagcactttagtgttgttaggatcagcttgtttaatccacttagcgaccgttgaaacactgacgttgtattctttagccagtgagttggccgaacggccagtctgacttaagctaacaatcgattctttaaattcatttgaatatttaattgccataataaaaagctcctttatgatgtattatatcgaacagtttgtccgtaattccatcataggagccgattcaagcaacttaattgatacagaagaagctattcaagtctacatgtatgatgtattcgctcaattaatgggtcagatttttaccaatattaatcaagtgatcaaagaggaaaaacaacgtgaaggctgggagaaaaacggaaagcgcgtctccttaaaggaacctaaagccatcatgacgacgaaaaaaactgctggtttttaggcagaagttcaagcctttacagcgagccgttattcgttacaacaagctcaaatcattacaaatagtgacggtggacaaggctataccgcagataaattccaagaagctttttctcaatccagcttccgatggtaaaacatctccgctagggtggttatgataaattaaaatcctcgctgcattattaagtaacgcgctacggaatatttctcttgggtgtgcaacactctgatttatcgaacctgtaaaaactctgtgaatagcattaatttggttttttgtactcaatgcgactaccaataaaacctcttgtgcttcatctccgatttctttaatccctagttgcttagctaaaacgcttgatgtgatagttgtttcatatgctactggtctttctgaaatcacttgttttacccttactatctctgtcaccttgttgttatagttttgttcttgttttgtatttgtcatttttctctctcctttttttgttttgttaagccagagtgttagctcaaaagctgaattttttccgttttattggctagcctataaccatgaggttaaaaggaaatcaagaaaataggagcccttattgctttagcaattagaactcctttagacaaaaagtttttttaatggaatgaaatgaaatgcggaaaaagtttttgcggttcttgattttcttttctgttctcggatagaaacttttgggactgaaagagggttcccaataggttattgccgaagaacagcccgttatggtgaagccctgatttaacttgttaaatcgtgtagggcgtttggcttcacaaaacgaaaaaatactttcactatcttttaaagaattttgaaaaaattcctctgctttaaaagggaaaaacgacaaactttcagaagttgtttcttgctctctgttttaaacaatctttacggttctttaataggtagttgtcttgtatttagtttaagatgaccttagaaagcttctctgacaaccatatattaatatcacgagtattctcggttttctcaacaaaaaagaagacagcccatttagagactgtcctctcaatatagttgacatagagttcgtaactatcgcttaaatgatttctatgcctgattcattaaaactaactttatttcattttacgatcaatgtctaattccgtttcataaacgcgtggttctttactgaaaagatattcgccattacgaatagaagctaaacattctacacggcgacgttgcgcttcaaaggcgtttggtgcatcaagtacaataaagttggctggtttgccttcatctaagccgtaaacttcttccacttgcattaattgtgcaccattgtaagttatcaagtcaaagttgcgcgggaagtcttgttcacgcatcaattgagttgcgtgcaaaccgttatctaaaatattcattaagttacctgaacctgcaggataccataagtcaacaatagaatcttgaccaaaagctacatttataccattgtcaacaaactctttgactcgagttaaaccgcggcgtttaggataagtgtcttgacggccttgtaagaataagttttccgtcggacaagcaacaaaattcatccctgattgacggaataaacccatcattcggaaagcatatgcgtcatccgctgatccaaatgaacaagtatgtgaagcagtagttgacttgccataaccttgtttcatagcttctgcattcaacgtttccacaaaacgtgcttgaacatcatctgtttcatcacagtggacatcaattaacttattatatttaatagcaagacgtacgatttctctgacagattctttaccatcttcaggactccactcattatgtgggataccgcctacacagtcagctcctagttttaaagcttcttcaactaagtcgcgacctgatttaccttcttcgttatatgaatacatgccgttttgcgggaaagccaccacttggatggtaatattgtcttttagttcatcacgaacttcgagtgctgctttaataccggtcaagttaggatcggtacagtctgtttgtgcccgaataaattgcgtaccgtaagaagcgacatctttaactgcttgacggatacgatttttcatttcttctttagtagtgccttttttatagtcattccataaatcgatagcttcaaataaagttcctgattcatttttgattttgtcgtcttgaccagtgaagtaatagtctaaatgcaagtgagaatctacataagggggtaaaacaaaacgtccttgtaaatcgacggtttcatctgcttcacctaagttattaccgattgcagaaaactttccatcttccactaaaatttcagatgcgttatcctgtttgtaaattgtagcattgataaattttttcttcattctctataacctcctatgttttctaattacactctactctcttcaaatatgaaattcaaacttttagcattatccgctatgttgaggttccattaatgccgtttaaaaaaggtctcgtatccgtttagtttctattgtttgaattttagtcatagggttactataatgaaagatagtatgcgttaaacacgtaaaaaggaggagttttatttatggatcatacacaaaaacatggtttttcttggcctctatttattttaatggccagtattacctttatggctattttatctgaattgatgccttctggcatactgccagaaatggcatctggttttggcatcactgaagcgcaagcaggtagttttgtcggacaatatgctattgctagtgccttgtttgggattcctattatttcagcaacagtggaatgggatcgaaaaaaactattgatgcttttaatgatcggatttgccattgccaatataactattggctttgtatcggtttattggattgcagctgccgcccgtattgtagggggtatttgtgctggtgcgctttggcccatgatatctgcttatgggatgagtcttgtttctcctaacgaacatggtaaagcagtagctgtcattatggcaggaaccacagtagggatgagtatcggcttacctgttatgacttggattggtacaacttttagttttcatatcgaatttataactatgggtattatcatcttaataattgctgttctatgtcaaatgtttttacctcatgttggcggcgagaagcgttcaaaatcaaattcgccgttcactatgttaaaaaacaagggagtattgatggtaattctattaactgttttagcggttgtagctaactacgggatatacacatacatcacaaacttagttaaagatattcattacccagggattggtttagcacaaatcttattcggtatcggttcaatcttatcagttttattagctggccgctttattgatcatcatttacaatctgtttgtataggtatgttagccgctgcaggaattgctatgtcaagtttttactggatagattcgacattcatacaccatctttcatttattttttggggaattggttttggtgctctagtgactctcttccaaacagctgttacacgtcaagtcaccaaaggtacagctattgctacctcactccaatcatctgcctttaacttttctattatgattggtagtacgactggaggatggttattaactagcggatcatcagctccaattgttatgatggccctaatcttgttagttgctggaatcatcatttcactatttgctaagaaaacacttgcctaaacttatcagtatgctattaatagagtacaatccgaaatcttaaaatattataggacctatatttctgatagtaagcaaaaagaaacagattcagttttcatactggatctgtttctctttattttttattatcaaagataaattctaatttattatcttggcaaattctataattaatccgaacagaaattaaaaagcccaaagcaatcacttacaatggtagtagctaattccaaccaatatagggagtgattactttgggtacatctactttatcacgttttcaacgtggcgcactagcacaactggtcaataaggggaataaatcttaccaagtaatggctgacgccttaggcgtcgccaaagctacgattagctatgagttggaccgagttaaaccttatgatccagaattaactcagcaagatgcagatcgcaaaaggcggaattgcggtcgtcgttcgatgctgacggcagcattagcgactttaattaccaatcacttacgattaacctggtcaccagaaaccattgcgaccgcttataacttgagcactgcgtcaatttataattggcttaatcgtggctggctccccttcaaattgactgatctacccaatcggaatgtccgccagcaccgagtgagcgaaaatcgtgggaaatttacaagtgggacttccatcgaacaacggccaacaactgttaatcaacggttagcttttggtcattgggaagtagatacggtgctttctagtcgaagtgagtcacgatcatgtctggttacattcgtagaacgtaagacccgacttctatgggccatcaaagcccctaatagaacggctaaggctctaaacaccgcctttggtaagtttatgggggccttcggtccccaagtaaaatccattactgttgatcatggtaaagagtttgccaattatcaggccttagaacaggattatcagatcaaagtttatttttgccatccatattcaccatgggagcgaggttccaatgaatattttaatagacggttacgctggttcttcccgaaaaagaccaattttagccaagtaacgactgatgagatcctagcagcacttgaactaattaatcaacgaccattaaaaatacatcatcaacagactgccattgaaagattccgggcttgttcggattaaacttgtaatttgccgttaaggttttgctgctccattttttcggtaacgagaatttacacccctctttatacccggtacagccataaaacggctcctatgtcaagaatccggacataaaagtacgaacaaatttgactttcagtttgaattacttaatttaattttcggaggccgaagttttagtcccgttcagattttaaaaacgctttagagtatattaaataagccccaacattattgaatttaatagcctgtagctacgctacaagtgaaatacgatcactgttataccaacgaatatagttatcaattccggcgattgcttcatgaattgtcttaaaatcttggaacttaacgtattcacgtttcaaaattgaatgaaaactttcaattcgcgcgttatcgccgggctgaccctttcgggagtaagaatgcttgataccatacttcgataaagtgttttcaaataagtcacttgtgtattggcttcccatatcactatgaataatttgtggtttaactgcttgcgccatgacttgggtaataacgttagtcgctagttctttagtcatctgtgtattaagttggtaagcaataacccgtcgggttactggattatagacactagctaggtaacaccaagtatggttaagggggatgtacgtaatatcagtcaataaaataccagattgatcagttaactgcttaatcaagtttggtcgctgatcataatcagtctgagtggttggcttattgattcgtttaaccattctaaatctaatccctaattcacattcacacatttgttgatagaccagacgctgactaacgtgaatatcagactgttgatttagtaagatcgttaatcgtgggtagccatacattggatatcttaaccaagccgttaacacttcttgtttaattaaatgccggcggcgttcagttctacttggctgccaatgtagataatcatagtaggttgagcgcggaattttgagtactgataagatacgcgtaatgcggtgcccagcaagtaaattagcgttgacgacttctaacacgagggcacgccctttaataattagctttttgccatgagcaccgccgctcgttttaaaatatcaagttcttcttttaaccgtttattttctctaatcagagcacgttcatttgatgatagcactttagtgttgttaggatcagcttgtttaattcacttagtgaccgttgaaacactgacgttgtattctttagccagtgagttggccgaacggccagtctgacttaagctaacaatcgattctttaaattcatttgaatatttaattgccataataaaaagctcctttatgatgtattatatcgaacagtttgtccgtaattccatcataggagccgttcgctgccattaatggcggactatgccactgaacagtactggcaacaacgcatgtggttgaattacatcgccaccgaattgcataagaacttcatctcaccatttcgtaaaggcaattggctccccaatacacccgaaagccaagatttagtccgttcacgggttttcccacggctcgcttatattgaaaaagcgttagcgggccagtccttcttagttgctaatcaattcagcgctcctgatgcttatctattcgtcatgaccaattggtgtcgacgactcgcattttcattgactgacttccctaatctggaccgttttgatcaacacatgcgacaagatccagccatgcaatccgtcctcaaacaagaaggcaaaccacattcatcgaaagcttaatcaccaaaaaaggaatcagcagtcgctgattcctttttgaatgatttacatcacattaatcgtgacatcaatattgccacgagttgcctttgagtatgggcaaatttcgtctgcttttttgagatacttcattgtttcttcttctgataaaccttcgatgtgaccgaaaagatcaacaccaatataataattggcagggccatcactgtaaagggaaacggtcgccttaatcgtgggttcgcctttaatatgttcttggttaaggacaacatctaaggcactgttaaagcaagaactatagccggctgcaaagagttgctctggatttgtactcttccctgatgggtctgtccctggtgacttgattacatatttctttgcttgatcgggtgaataaacgaagccattgcggcccccttcattaatcatcgttgtttcatattgttttgccatttaaggtccctctttcttttattgaatacccttactttagcacagcaaaattcagaaccataatgatttgtttatacaaaaaaggcgccagccaaaaaatagattttggactggcgcctttcttgttaatccttaggctataactggctgattattcacacgctatttaatataagccgtcttgtagctccattgtgcgccagctgtgttatgcacaacgcctttgacctttggattcttcaagtatgccgtatcattttgatagagtggtgtaatcccttggactttattcatgacttgtgcagccgtcacgaggtccgcccaacgtttgtcaggatcgttcgcatcggcattcattgcgcggtcaagggcagctttgtattctggattgtcgaagccaccggtattacttgcagcccctggtaacatgatttctaaaaacgaaattgggtctttgaaatctgccccccaacctgcgagtaataaatcatagtcgccttttttatcacgactcgctgaaacttggcttggcacggtctttaatgtcaacttgaagcctggtaagactttttcaagttgacctttgagatattgaccaacatatgacgcgttggcatcatcggaattaagcgttaaggtgagggcaactttcttttgaccagtcgatttcaatgcttcatgccaatgtttaagcgctaatttttgattgtaatccacggtatctggcacggcttgtgatttagcaaagtccaccttcttaggggagtcggctaagcccactggcacgaaaccagtaatatcgtttttcttcgaaccgaatagccggttattcaacgtcttacgattaatcgctaacgaaatcgccaatctaaagtcttggttattcaaaagtgcttttttctgttcatctgctgatttgaagttatatttaatgtagttcgtcaacgcataaggatatctatggaatgctttatcatcccgataattatcaatttgttgattatctaactgggttaaatccagtttcttttcctgataaagataaagcgcggtgctggtattttctaacacggtatagttgacttggtctaattttacctttttgcgatcccaatattgattgttcttcacaaattgccacttctcactcgtcccattccagttaactaacttaaacggaccagagtacaccatgtatttcgcattcgtcgcatacttcttaccatatttttcaaccactttttgatcctgtggggcaaataatggataagccatcaaggttttcatgtaggccacaggtgtggataatgtgacttccagcgtgtgctcatccactgcccgtatgccgagttggtctggtgccagctcaccttttgcaatcgctggggcattttggatattactgaaaaggtttgtataaggtgatttggtttctggtttcaatgtccgttgccatgaatagacaaaatcttgtgcccgaatcgggtcaccattactgaacttggcatcacgcagtttaaatgtccacgtcttaccatcagctgaaactgaactcgatttcgctaagcctggttcaattttaccgttctcaccaagccggaataaactttcataaatgttccctgtttgaccatatcccgttgaagtcgagatatcaatggtatctagtggtgcttgcgcgccaagctgaagaacctgtttggcttgcacccccgaaacttggcataataagaacaccccgaatataaaaattgcactaacactaagttttaagaactgccgccctctttgcatgacacgcctccttacatttaataagtagagtataccaaatcatcagtcaaaagttaaataataagcctaaaaaaagaggcctttgtaaaattaacttttacaaaggcctacaatattaattagacggaattctcgactgacggcacattctaaacgtgcttttcaaaccatgttcctgcgtttagcctaattagccaaataagcggcttcgccgctttttcgtctaattttgctaatcctcagaacataaacggtttgaacgcactcttttcctaaacgtgcttttcaagctaactttctgcgtttagcgctgtgaatcaaatcatcgactgcgtcgctaattcgcttccctgtgctaatgctcaaaagttgaccagcttgaacgcactcttattcgaaacgtgctttcaaaagcatactgctgtgcttagctacacaagtcaaatgattgctttcagcaatcattcgccttgttaggctaatgctcgcaatatacccgcttttgacgcactctttagttcattatttcaaacaattgttttctgaattctggaccgtacatgactgccccgactggaatggcgaagtctagtgcttcgttaattttagtcgtccaggttggtccgaagcccccacagagttcaataaattggacgccttctgccttcaattgcttagcgacttcaataattgaaccatcttctttagcacgtggatcgaacccgacggtaatcatctcgcacgttcccattggattacggttaatcaccgtattttattcaggtgaaaagtctggtgaaaaatagaaaaacgcccatttatgcaaatttgctaatgccattgtttcgtcctccttgtttgctttcatcatagagaacaatcatgatagaggcaattttactgcctcttacagccagccattatgccgtgcaatctgaattgcttcaacgcggttgcttgcatccaatttgcttaaaatcgtcgacatgtaattgcgaaccgttccatccgataaaaataatgattcggcggcttgtttcgtactcaacccattagcaatcgcacgcaatacttccgtttcccgctcagacagtggattcttcgtttgcgttgtcagcccaacaactaattctggcgcataaacaactttgcccttcatgaccgaatgaatcgccacaatcaagtcatcactcgggccatcttttaatagataccctgccacttcggcgctgatagcctgcttgaaataactcggttgggcaaaagtcgtcagaataatcaccttaatctgtggctgacgcgtatgtagttggtgcgcaatctcaagccctgtcatgcccgacatctcaatatctaacaaaacaacatctggttggagggtttcaatctgatcaagtgcgacttgtccattgacggcggttccggccatcgtcaaatcatcctctaaatccagaatgcccgctaaagcggtattcaatagttgctggtcttctgccaaataaagtttaatcatgcccttccctccatcaatcgtttctaaccgttcgcgcatgcccacaatcccatgactcttatattgatcttcgcttttcaatccgcgaccattatcttcaatctgcatctgaaaagtcgttgcggttcgattaaaaaccacgtaacactccgttgcctgactgtagcgaattatattggtcacggcttcatgtaaacattgcgcaagcacttgttgattttgttgtggaatcccctcaagttggtcttcatttttagtcagcagtaaaatgcctgcaacgctgagattccgttcttgattgatcaattcctcagcaacggtcacttggcgtaaaccagcgacaatctcacgcactatttttaaattctgacgggaggcttgttcaatctcgagtagttgttcgggtaccgcgtccggttttttcgccaataatttacgtgcatattccgcttttagcgtaatcattgaaaatgactgacctaaattatcgtgtaaatctcgggcaatccgctgtcgctcattttgtttaatcatgtcagttaagcgctgattagtctgtactaaattgcgattcttacggttgaagcgctgaatcgatccggctgcaaatggcgagcaaatacagaacaagccatacacgaccaagccgattaaatcgtcgcgtcccatctgaccaccataataccaatacaacgtggccgctggtacgattaacgacagcagataggcacagtaataacgccagaaactacgccgccgcatgggaattgaaccaaacacccaggcagtataaatattcagataaaacgcctggataatgactgctaaaatcgcactggtcaccatttgtaagataatccagaatgcgcgataccgcgatgcgacatacccattgcgataagccaccaagaaaatcagaatcaagcccataatcgcttgctgcttaaccgtttgatacggaaacgcataaccaattggaaagagcaagaaaatcaaccaaacatatggaaataagccatattggggtggcatggcaatgtagcgtttaaaaaaattcatgcatgcatcgctcctcttttatgatggtttaagtatacgacaattgccagtaataacccagcccagagcaacgtgatgccatattcacccaagtgtgcgggttgatgcgcaatcagcgcttggccaatatgattaatcggataaacgggcaaatgcttaccaatcacgcgagctgttttgggcattatttctgttggccaccatagtccccctaaaatcgctaaagggaaaactaacaaattagataccagttgaatctgattttcatctgttaaaaatgaaatgctaatcccaattaaacaaagggggatgctggcaaaccacaaccagcccgccgttaataaccaactggaccacactaaatgaatttgattactaatcccagcaactatgaaaatgacgccgatcgttaaagcattgattaagcctaagttcaacaacttagccccataataagtccgatgactggttggtgataaatcgattaaggaaaccaagccatcccgtgcgtcattataaagtaatgtcgataaagtaaacgtgttgctgagaactaaactataggtcgccatactgaccatgtattgtcgattgaatgctgcattcatcacaccctgtttcattactttcgtaaacaagagataaaacgcaatcggcattaagagtgaaaaaataacaaagcgtggattacgccaatatgcgcgtttaaagtctatttttgtttgtaccatcattgtttgcattttttagtcctccatcatttcgctataaatttcatttaatgagcttgcttgaacctgcacatcatgaacctggatccccatcattggtgctaattgacttaagatcggatcgctcttggtaacttgcaacagcaccttggccccagtcttcgtcacgcggatcacgcctggccattttgcaaaagtagctgctggtaaatcagtcgtaaaacgaatctgcgttcctttaaattgttgttgtaatgttgccaagtcaccatcgaattggaactggccatctttcaataataaaatccgggttgcaatgtgttcaatttcctctaaataatgcgacgtgacaataatcgtcttgccggcttcttttaactgttcaatttgctgccagaatttttgtcggctgccaacatccattccaacggtcggttcatccaagaatagcaaatccggattgcctgccatggctaaagcaaaggagaggcggcgtaattgaccacctgaaagttgggacaccatcttatgagcctgtgccttcaaatcagctagcgttaataattcagcgactgaccgtggctgttgataataactgcaaaccaattctaattcttcgatgacactgacccgagccagtcggacatttccttgcatcatcgcacccaataagttgaaatgttctttctccgttggcttctgacctaaaatccgaatctcaccagccgttggttggagtcggcctaaaattaaattaatcaatgttgacttgccggcgccgtttacacccactaagccaacaatctcaccaggttgaacacttaggtctacctgatttaaaacaacttgttgttcgaattgcattgtcacttgtttaatttcaatcattgtcatcacctcatttaataaccctagtatagaagtgattccgttttgtcgttagacgattttgtcatgacttacagatgacaaatgtcatgtctttggtgttaaaataaagctgattcgttttaactcggaggttttaattatgacaccaagccaaccagcagcaccatcattttttacgaaccggtctacccaagccatcgcgcaagatttattaggaactcacttgctttataccagccaccaaggcacacttggcggcctcattgtggaagcagaagcctatgtcggcaccgatgacactgccgcgcatgcttacaatgggcgccgcacatcctttagcgagccgctctatcatgagcctggtacaatttatatctatcaattacgcggtttctttctatttgatatcgtgacccaagcagtggatcaaccacaaggcgtcttgattcgcgccatcgaaccgacccacggcattgaacaaatgcgcctcaatcgcccgaaacctggcgtcgaactgactaacggccccggtaaattaatgggcgccctcggcattcacgataaacaactgacttttcaaaatgtggcggacgcccctttaatgattgatttagcgcatcgtcgccaccccaaatcaattgtcaccgcgccacgaatcggggtcaattataaagcagcgagtggtcaacttccttatcgctattatgtcgctggtaacccgtatgtgagtggtctgcctaagcgccagtgggacttagaacaacatggttggcaattttagcgccaatgtcaatttttaattgaaaacgatttcaacaatgctataataatcttgtgaattaaataattaagttagaagatcattgcatgaaaattaaagcagctgttgttgaacaacaaggcgcaccatttgtcattaaagataacatcgaactcgcaccactccacccagacgacgttcaagtccacatggtggctagtgggatttgtcactcagacgaagcgcttcgtaaaggcgacgtcattattggctatccaatcgtcctcggccacgaaggttccggaattattgaaaaagtcggttcaaacgttcaaagtttaaaagttggcgaccatgtcgttctctcattctacgcatgtggcatctgtgaaaactgtctcaaaggcgttccaacacaatgcctcaactacgcagaaaataacttatccggcgtgcgccctgatggtagttcccactttactgaaaatgaccatcacgttgccgatatgttcgatcaatcttcattcacaaccacaaccgttgtccgcgaacgaaatgcggttaaagtccctgacgatttagacttacgcaaactcggaccactcggttgtggatacgtgaccggtagtggcactgttttaaatactttaaaaccaaaacctggcgacacaatcgccgtcttcgggactggtgctgttggactcgcagccatgatggccggtaaaatttcgggttgtacgaaagtgatcgctgtcgatatcatcgacgaccggctcgcactcgctaaagaactcggtgcaaccgatacgattaacagtcgtcaaacagacgacgttgtcgcagcaatccaagccctcacaaatgggcgcggcgtgaacttctgtgtcgataccacggggattacaccagtcatggaagattcaattaaggcgctttgccaaggtggggtgtcagcaacaattgccgtaaccccaaaccacatcgatcttgatacttggaacgacttatgtgtcaacgacaaatccgtcgtcggcgtcaacatgggtgactccattccgcaaatcgacgtccctcgtttaatcgaattctaccgtcaaggcatgttcccctttgataaaaccgaaaaattttatcaattcgaagacatcaacactgccaacgaagcctctattaaaggtgaaacaatcaaacccgttttgattattgacccggactatcaattctaagcaatcaaaaagaccgcttattcagcggtcttttttaatttttctgacgccaataatggccaagtgttatcaacatcatcaagacgattattcctctgagtaaccaaagacccaatagcgcgccaaacacaatggtaactgcagacactaatggcttttggaaaataaacgcaaaccctaatataataatcaatactggcatgcagtccagctccttttctttttgaaaattgcatgttaaatttaaagcaatcatatgaagtgaggtgttagtagtgccagctattcccgataatctacttgccgcgaccatggggcgtaaactcgctacggttcgtcgtgcgcaaggcttgtcccaacatcaattagcccaggatatttgttcgcaaccgatgattagtcatattgaaaacggcacttatattccaaacgccattttgttagcaaaactctgcgaacggcttaatatgccgttagaacaagcgctgttaagtcattatcccgaaattgatcaacaacccgaattcaatcaacaaattaaacaactgtgcaatgcacacgattatcgcggtatgttagattatttggatgcgactggcttggccgaacaccttgaactggcgaccgatttacagacctattactactatcatggcatcgcggcattccaagaacttcacacaaccacggatagtttacgggaactacaaatggcactcgactatacgtttacaccgcgccaacaagttttaacccctactgagattttgattctcagtagtatcagctttattaagagtacgccccatactgatcacactgatttcgaacacgtcctcgcgattgtgaatgcagggcggttcacgcactatgacgagaacattaatatcttattctacctgtatagcctggcactctatcaagatcaccactttcaaaaagcttttgccatcgccaatcaaggaattgactggctcagcaatcatgattcacactacatgttagccgacttattcttgctagtcgccaagacagcgactgcgctcaatgatccgcaagccactacggcagctagtctgaaaagcgatcccctagcagagatcttcaatcaatcccgttatcatttctaaaaggttaataaaatccggccctgtgaatgctcgttcttagcaatcatttgggcttttttaacgtcctcaaaagaataagtcgcttgaatatcgtccttaatttgctgggtcgccaatagttgtaataggtgttgataaccgccaatcccgattgagccattactgaagcggaaatcttgccccggattggtgggtaagaaatcgattgtcgacaacgacagtattcttagcgaaccataacttgtggagattaattggaggagtgcttgctggccaactgtgtcgatgactttattgggctgactgttattgctgaattgtgtggctaaatcggcttcataattcaaaacgctatcggcgcctaattgacgaacaaaagcctgattctcggcactggtcaaggcaatcactgtggccccagctaacttcagtaactgaattaaataggtaccaaccccgccagaagcaccggtgactaaaaccgtatccgttgattgaatctggagagctttaattgcgtggagcgctgcgtcggcacccccaatgagcgttatcgcatctgctaatgtgacttgatcaggtactttgaacaacagtggcggaattttattgttgataacctcctgcgctgaaccattcggctgcattccaatcaccctttgcccgattaaacttgaatgtcgtagtcggccgacttgttcaacgattccaccgaagccatagccaatcacaattggtaattgaaccgggcgaatctcggtcagcgccccgctttccgtctgccaatcatagggcagcaccgggacgaacttgttgcgaatcatcaccgacaacggcgtcagcgggccttcttcaattgacttaatctggagggcttcaattccttgataattctgttgaataatcccttgcatatcactcacacctttcttttgccttacaatacaaggaaactcacaaaaataaaaataagaatacgaatatttgcaaaaaaaatcgacctagtctcacattagactaagtcgattttttacatatgttactcagagtatgcaacctgcgaaacacgcttcattttgcggcatacctagtgattgaatctaaaaaagatgcccagtcgcgctttgaccgaacatctgacttatttagagataacttgataatagattttgtagattcttatattgggtagtttacctaaattttcattggtgatggtccctacagcgacacttacattattggaactcggtagctcgtcataaacggccttgccatacgctaacttaaacgttttagcaaattggttaacctggttttgggcaatcgccattgtattgggttccataaaaaacagattagtcatttgcgtatgctcagtttctaaatagtcctgcatatattttgcgtttttaatataaccggcagattgtaaaatttaagttgaacatttaagtggacagaaaaacccatcaaggtctttaatggtgttaccacacaatccattagaaagaaggaccttgatgagcaccactattttatcattccagaaccgtgttgtcattgaaacgcttcataatgaaggacgttccttgcgatacatcgctaactacttaggctttagtaagaccaccatctttaacgaacttcaccggctaaatagtgagtaccaggctgggctagcgcaaactgactttgaacgaaaggttagtcaacgggggcggaagtcttcgctcactaaaaaccttaaacacttgatcgaggaaaagattcaagtccagaagtggtcccctgaacaagttgcccatgtggtggggattgcctacaagacggtctataactggattgatcaaggatggcttgatatacagttgcccgatttgcctgatcatggaattcgtcgtcatcgtgctaaagaaaagcgtggtacgttcaatcacggccgctccattgaggagcggcctcataaagtcgaaactcgccaggaattcggccactttgaagctgataccgtactttctggtaaacgtaaaggtcaagctgtggctacttttgtggagcgtaagagtcgcctgacaattgttaaacggctccatggtcgcgacagtcagtccatgactcaagccgtacttgaactagctagtcaacttcaagacaagctcaagacgcttaccgtagatcatggtaaagagttcgctaactatcagacaattgaacggcgaactggtacacaggtttattttgcccatgcctattcaccgcatgaaagaggcagtaatgagaaccgtaaccgagttttgcggcgctttattcccaaaggccaagccattgaagaactaagtgatcaccaattggttcaaattaattggtatttgaattcacggccacttaaatgtcttaattggcatacaccaatcgagatcttcttgcttaatttacgtcattaaattcgttcaagttatttcttgcaatctgcctttttcaatcttttgtgtgtttttttcatttgtggcgtctttttgacatcctgatgtaaaagccatcataaacaacaatgttattgtcaaaaaaatagctaatttcttcaaatggtcgccctcctacccgatgcttgtcacagtatacactgcttacttaattcgtacaaatctagcgttgaaaaagccccaccgaatcggtggagctttttcaacaactttttcaataccaagctggtttatcaccgtctgtattgggtttattcaatcccaatgaatcgccgatggcttcatttggcgattgaatgaggcgtaccacctctgcagcaacgctctttctagaaacctcggtgcctttaaagatatcatggcggtgcgtgatttcataatcgatttcatccttatcgtccaaccatgctggccggataattgtataatccaactcggatgttgcgatgacttttgctgccgctgcataagttggtaagtagccatcatctaacatctgatgattccacttaccatatgcccccggaacttcatcataaatccccaatgtcgaaatccagattaaccgtttgacgttagtagccttcatagcggccaccaccgctttggcttgcgcttcaatattccgaccagctagattggcgtaaaccactgaaacgcccgtcattgctttttctaaatctgcttgattaccagcatccccatcaatcacttgttcgcgatcggcgtcttgaaccgttaggcgattagcattgcgtaagaataataccaattgcgcatccgtattcgctaataattgttgccgtactaattgtgcaatctgtccgtgcgcgcctaaaatcaaaacttttgtcatttatatgccccctattaatgattacaaacaaattgtagtcgctttcgaaatactttacaaacaaaaacacttacttttcgtcaatcattttaaattcctctcagattcatggctttttcgtcacattttattcataattgcttgttattctttatacatcagatgaattgctcccaagaaacaatctgacccacgtgttttttagatcattcctccctaagaatatctaacacacccaatgcgttatagtttaacggtaaaacgaaccagtccatttgaaattcctccctagaatcggtaatggttttgcggttaagaatgtttggtttcgaaggcacaatcatttctcaaccgcgctcactggtccatgtgggttcaatccccactaacgcgatttaacacatccccatgcaaaaaaggaatcggcgctttatccgctgattccttttttcgttacttatttatcgcgtttaattgggactaaacgtttgatgaatagtgcggctgttaataccaacatacctagccaactccaaacgctggttgatttctcaccagtttgtggtaactgttgaccattagtactttgacgattattagcttgattcaaggcttttgagctaatggataatggttttaacgtaccaggtccgtgactaccaagctgaccattgcttgatccgccttggccattgcctaaacctgaaccgttattgccagtacctgtgccatcaccggtaccattgccattattacctgttccgttaccgttattgttgccattgcctccaggattaccgagatcgctggcagaaaccagaatatcaactggaacactcgctttttgataaccatcattctccgcaagaatttgaacaatgattcgatcaccagctttgagaccatcaacacgggctgcgaattgaccattttcatcaactggtactctcacttgaatcccgtttggcaatgtcaccactgctgtaaagttagtcccttccggaattggtttcgtaaatgtcacactacccctcacagctttgtcgcctgccttaacaggatcgacaacgggttctgcgacgttgtaattttcaagtggattcgttggattggcagctgcgactgtcatttcagcggttgcactttccttagtaaaggtaccgttagtagcgataatcttcacttgaactacttgtccggcggttaatgcatccgtttgaattataaaggttccatcagctgcggcattgctactatcgagacgaacaattcgggtccgtccatttggcatgaccatgatagcttcaaaggtggtcccttctgggaagtcgcctaattcaacagtcccactaaccgctgtttcgcccgcttttgcagggttcaatgttggtgttgccacgtcataatcctcaattggattcgtcactgcggctttgtcgaccgtcacgataattgggtcactcgctttttcgttgtcaccgttatgggcgatgacttcaaccgtcaactcgtcgccttctttaatcccatcaactggcattgtgaagtgcccttgatcatcaacagttgctgtaatcttgtcaccatttggtaatgtcacgactgcttcaaaactagttccgtccggcactggttgcgtcaatgtcacgctaccggtggcctgcttgtcgccttccttaacgggatcgacaacgggttctgcgacatcatagttttcaagcggattttcaatggttgatgcaccaactgtgactgatacattttcgctatccttcgtgtaagtgctgttcttggctgttattttaacacttaagtcactatctgcggttaagcgcccagtcaccacttcgaaattcccatttgcatcaactgccgccgttttctgtgccccgtttggtagggtaacggttgcttcaaacgttgttccgtctggaattggcgttgctaaagtgacttggcctttcacgctcgtttgatcggccgtcactggttcaacggttggttgattgaccgtgtagtttgccaacggattcgtatcaagttgtggactaaccgtttgataaacaatcgaactatctttagtaaatgtgccgttcgttgcgacaatcttcacaccgactgttgtctctgcaactaatgtgttggttgcgactgtaaattgaccgtcagctgcaacgggtgccgatgtcgttgtgccatcagctagcgtaacaactgcggtaaaggttgtcctgtttggaattggaatcccaaggttcacttgcccagtcacttgggtttcgccgtcggtcattggattaacaacgggtgcgttcaccgtatagttttcaattggattcgtggttgtatcggctgcaacaatcacatggataggattactttctttttgatttgcaccattatgggcaatcacgtggacgattaattcatccccggctgccaatgtgcccgtatcaacggtaaaggtaccatctgggttgagcatcccggtcttcattgaaccatctggtaaagtcacttccgcttcaaaagttgtcccagcaggaatcggttcttccaaggtcactttcccggtaaccgctgtatcgcccgccttcactgggtcaacaactggttgtgcaacgccataaccttctaacggattcgttggcacagccttgtcaacggttacattcactggatcactatccttatcaaaaccgtcgttatgcgcaacgactttgatcgttaacttgtcgccttctttaatcccagccactggtactgtgaactgcccttgatcatcaacagttgctgtaatctgatcactatttggtaaagtgaccaccgcttcaaaagtggtgccatctggtactggtttattgagagtcacgttaccagtgacagcttgatcgccttctttaattggatcaacactcggtttagcaaccacataattttcaagtggatcggctctgctgaccgtaacggtcgttggatcactcactttttcataaccactattttgggcggtaatggtaacttctaataccgcattggcttctaatgcgccagttgcgactgtaaaggtgccatctggcatgacatttgccttcttaatcgaaccatccgccattttaacgttggcgataaaagttgttccgactggtggattattgagggtaatttgcccagtcacacttgtatccgcacttgttactggatcaacacttggtttcggtacggtataaccatctagtggatcagttgcaactgccttgctaattgtgatttcagtcgttggactttctttttgattcatcccattttgggcaatgacttttactgcaactttttcatcagccaccaaagtccgggttggcacttcaaaatcaccggtttcaggaaccactacttcagcagttgtcccatcttcataagtaaccaatgccttgaacgttgtgttggccggaattggcgttaccaagttcacgtgccccttaacgctcttatcgccttccactgctggtgtgacaagtggtgccggcacatcatagctttcaattgggttggttggtaaggcatctgcaactgtcattgttgctggtgtactttctttagagaaggtcccgttgaccgctttgatatgaactgccacttgtgttccagcaactaatgggtcgccggttgccactgtgaaactgccatctgcattgactgcaccggtgacttggcggccaccaggtaagactgcaattgcttcaaatgtggtgccggctggaattggttgactgagtgtaacttgctctgtgatattagtatcgccatcacgcgcttgatcaatcgttggcgttgccatttgataatttgctaatggatcttcaactggtgccgcttcaacgttgagttgtacgccagcactgtctttggtatacgaaccgttagttgcgacgactttaaccgttagttaccgtttgcccggcagctaactgatcaacaccagcacttttgaatgtcccatcactttcgacagtccctgttaattgcgagccatctggtaaagttgccaccgcttcaaatgtcgttccgagcggaatcggttggttcagtgtgacttgccctgtgatttccggatcacctgccgttaacggggcaacgcttggtgtcgcgacgttataatcagcaattggattttcaatcggtgcagctgtcaccgttgcggttgtgattggactgtctttcgtgtaagttccattagtcgcaaccacttttgctgaaatagtttggccgtcgactaaactaccagtatccacaacgaaggtgccgtcagctgcaagcggtacgtttttggtgctaccatctggtaacgtgaccaccgcttcaaatgttgtcccatccggaattggttgcgtcaaggtaacttgaccggcgacctgtgtttgaccggccactggttgcgtaatgactggggcagcaacatcataattttcaatgggattaaccgccgtcgttggaaaattaagtgtaacagcttcgccttcttgctcaattgccgttaaaacatcggctgaaatcaatgcattattgatggcaccagctttaacagtcgcactggcaacccctggatcactaaccgtggtgtgcaaggtgccattcatggaacctaagaggttggcgtttaaggcgttatctaaaatatcggacgtcccatcggcaattgcatcaatgatcgcaaataaatcagcactcgcttcttgaagtaatttaaccggaatcgctgcgattgggttcttaacaccaatcgcggcaatcgcatcccgtaatgtatcaaatagtgccacataagcttgatggacgtacttgccaaagccctgtgtgaagtcaactgagatggttttaccatctggtgacacagtcgctggtaacgtttcttggtaggcacctaggttctgaatagtgcttaaactatcaaaggctgccttaacggctgggattgctacaagtttatcacccccgtcaatcgccgtccctaacgcaccaaaaagtaaactaacccccggaatatcgcctggtgtaattggtaatagattagcgtcaatatcaacagttgcaccaccaaccacttttccttgtaactcagcaggtaaggcataaaccaagaccttcttatccgcgacgccaactgatgccagtccggtcccagaatacttcaatgctaaatcataattgccttgcgcgttcgatgtcatatctgttcctgtcactgatgttagactcgcgttggctaaaatcgagatatcggctaagccagctctaggcgctacttcgctcgcttgcactcgattttgattcataccaaccacgcttgctatccccgcgccgctattcagtaataaaagagtcccactacacacatacaaacttcgtcgcaataaatgcttttggttcatcctactattcttttccatttcattgcacccctttcatttgtcctcaatgtatcgcttccaattatggttctcatattaatatgcttataataactatattaacattgtgaaataatcgcatttatccacatcttgaaagggtttcaattgctcaaaaatattattttttttatgctaattgtgtacaataaaaaaagagccacgacaaaaaattgacttttgtcgtagctcttttttgaaattctatatggctcattctactgcgctaataattgtccaattcttgatttaaattcagttaagaaacgcggcgtatcaacttgtacacaaaccgccgtccgcgttgctggatcatctaggcgggcattatccccaattgttcgtccacgtgacgggccttctatctcagtcttcaagttcaatgggaaagtcgtgactaagctaggatcgattgcaacagcgactgctaagggatcatgtaaggcacagccgtataaatggggagaagtgacttcataggctttgatatagtaatcaaccatatcggcataagctttggctgctggtgtaccgagtgcgcgccattctgccgtatcggtgcgtgtaaaaagtgtgcgcaacgtgacatcaaggcccaccatcgtcaccggcaaaccactcttaaagagtaagtccgccgcttcagggtcttgactgatattagcttcagcaaatggagacacattaccacaaactgttaaggcgccacccataatcacgatttgaccaactttcttcaaagttggtaaatctttttgaatcgctaacgctaaattcgtcatcgggccagttgccacgatgctcaagtcagccccatacgcctgacaagcacgtaatataaaatcaacggctgattcagttgccatttccggatggggctctgtcagatgaatctcaccaacgccgtcttgaccatgaatttccgcactaattggtaagacgctaaaatcatgcgtcgtcgtcgaatgcccagcccctaaataaactggaatgtctggatgacctaataaatgtaaaatttgttgactattcacaacgcttcgttcagtcaaaacgttaccgtattctgaggtaatcccgattaaatcgacttctgatgatcccaatgcataagcaattgctaacgcatcatcaatcccagtatctaaatccaaaatcattttttgcgccacgccaagccctcctcaataatcatgcaaaataatgtacaccacaagtgtaccccattatcggggatgggtaaattaataacctaaggattaaactcaaaaaagacaagtagattattctactcgcccttttcgatgattcagtttagaccattgatttcatgatgcattaaaatcgtttgaccatctgactgagtcttattttggagccgatctaataacaacttagcagctgccaatccaatcgcttctgttggcggttgaatcgataggattggcaactgtccaaattgatgttcatcggcataatcatagtgaccaaatagtaaatcttggccaatccgaataccattttctgataaataagtgagcgcaccaaaggccatattatcattgctgacaaataaagctgtaataccttcggctaataatgcttgggcaccgcggtacccgctagtccgagaatagtcaccttcaaaaacatgtaactgtctgtctggataagctgccatcgtctgtttagcacctgccagtcgttcacgggcaacataatcatcctgattagcggcaatcatcccaatattctggtgtccgagatcaataatttgttgcatcacttgtgccacacttgcgcgatcatctaataaaatcgaatcaacattgcgtagctgatttgggttattaatcgtcacaaccggaatatcaagtgccgctagtcgttccattccttgccattcttcacctgctaagaaaacaattaaaccatcaatcgaatgcgccattaaataatcaattttttgatcaattaacgctggttggtcactaaaaccactcaataataaactatacccttgttgctcaacgcgttgttctattccagaaacaacttccgcgccaaatcgacttgaaatactattcatcaataaaccaattgaaaaactttgattgttcttcaatcctttagcgataatattttgtttgtaatcgagttgctcaatggccgctgcaatcttggcttgattagctgctttaagctgttgcccattcagataccgtgaaacagttccgaccgagactccggccaattcagcgacttctctaacagatgacattcttattccccgcttatatcgataaagtgattttctccgctaaatcagcaaccataatagtcgctgcttgcgcacgtttcacctgattatcaatatccatgtaattaaaatcagcagcaggtagttcgaaagtaatgctcttttcttcacctggttggaaggcattcttttggaaagcttttaacagcttcgttcgttgaataactgctccaccagttaatttgacaaataataaactactttcttgacctacaaactgtccgttattttttactttaacagttacaactagtttgtcaaccatttgcttaaccgctaattgtcgataatcaaattggtcgtaactaagtccgtaaccaaatggatataacggttggccaacctcatcatagtaatcatcttgtttagcagcatcgcgttgatagtagtaaaccggtagttgttgggtattgcgtgggtaagatacactcaacttaccacttggattattaagtcccactaaagtttcagcaattgcgcgaccaccttgttgaccaggaaaccaagcaatcaatacagcatctgcaagttcatttaccagtgttaaatcgtatggccggccttgcaccatgacacatgcaattggcttgcctagtgctttcaattgcttgagcagcacttcttgttggccccccagactaagtgatgcgacatcaacattttcaccagaatccatgttgatgccttttgaactcactgccccgttacttaggaaggccatatcaaaattacgtgcactggaaccacctaatacagggatgattaaatcggcatcgcgcgcaagctcaactactttggcaattgcctcttcttgatgaattgaattacgcacctcacagcctaatgcatacacgacttccgactcgggaaacatttcttgaatcgcttgataaattgtttgcgcttgacgcgctgaactttgtgctgctgtataatcccccaagagattatataattcatcagcattggggccaatcaccgcaatcttttgcggctgattccggattggtaaaagcccattgttcttaacaagcgtcatgctttcacgtgccacttgcagattcagcgcatcagatttttcaagtaaggccgtcaattgcgcattcggggcttgtacatagggttgttcaaacagacccaacaggaatttcaacgctagtactcggccagcagcattatctaaggcagcttcgtctactaggccattttcaatggcttgatcaagcgttaggaatgtctgatcccataaacttagatcgacacctgcatttaaggctgccgccgcagcttctggttgtgtttcaaagattcctgataaccgatcaagcgcaacaccatctgccatcacaatcccttgaaacccatttacatcccgtaaatcttgagtcaacaacggctgattgatatgacacggtaccccatccacatcgttataagcagccatcacacctgccgcattcttgacactactcaaaaggggttcatagacgtctgaaaattcacgttggccaattgtgacggtgcctgaattatggccacccaatgcttcaccttgcgcaatacagtgtttcaatacaacaccaatggcatcagtcgttcgcggtttagcaggttggtctaagaaagcaacatcactttgaattaaatccccttgaaaacccgctacaacggcttcactcattcgcgccgctaaaatgggatcttcaccaaaacattcttctgaacggccccaacgtggatctttgaccaaatcaagcgtcgaaacaagcgctaggttaacgcctttaagcgctagttcttgtaccatcaaatgcgatgattgctgcattaaccgcgtattaaacatattgccgcggccaatattagttgaatacgagattccttcaagcccttgatggccatgaggacattcttcaacaattaatgctggaatcccccagcgtgaatgcgccatgacatattcttgaactttattagcaactcgccaactatcctgtgcacgaacgccattttcaaagttcacttttgaccatggatctgcccgaaataaaccataaagtgcaccgacaccgccgccccattcaacatgcgccttgaatttttctgtaaacgttaatgactgagaatcttcgaaagtttcccatccataaagatgttgattcacttgaccaattttttcctgcgtactcatgcgtgaaagtaaatcagtgacccgctcacgaatggtcagcgctgcgtcttgatatggatactgcatttcaaaaaacctcattcctcagttaatactttgttacttgcaatgacaaatggtaagaataaaaagacatctaaaccaattaataagatggttaaaatcgctgctcggtaatcaccgccagttgccaagaaagattgaataacaggcggtgtaatccatggtgcagccgctaccgttttactaatcaaacctaagcttgttgcaaaataagcaatcactaaattgattgatggaatgatggcacatgaatcatgaagattgggttcataacaactggtaacccgaacataacaggttctgtaatattgaagaaacaagttgttaaccctaatttagcaacttgccgttgatctttccgccgtgaagcccataagatggcaatcactaacggtaagatacaaccgcccccaccaatcaagccgaacgcatttgtaaaaggttctgtaataatatttggaatcgcatgtcctgctgaaaaggccgccatattttcttgaatggcttgtagcaatggtgcttggcgaactggtgctaaaatgctagaaccatgcatcccaaagacccataagaaatctgagaagaattgtaagaataacgtacctggtacagataatacaaacgattttagtggcgtttgaatcgcaaggtcgattaattgagggacgttcaacccggttgtcacatttaaaataaatacaaaaatagcaaaaatcaaaacaaccaagacttctgggactaatgaattaaacgaggttgaaactgctggtggcacgccttctggcatcttgattcgtattttttcaaactttgtaaaacgaatgaataactccgtactaatcaatgctgctaacatcgctgttgcaagtcctgatgacgaggttaaactttgcaagaaaacgcctgttgcttccgccgttttcccatttgctaaagtgacggtactcgtcacaggcatcaaaataaacattgttgccaaacttaaaataccagcatgaactgcactaaatgcaggatcgttcactttcccagagcgaacataatgcgttgctaaattagcaccgatgttataacagaccacaattgataaaatactcatcgtcccattattcacaattgttgctagatcagctaatccgcttaaatcaacaatcttttgaacagcggcgtttgagaaaattagcgcatttaataaaaccataagcgaggccgccataacaagtggcattgtcacaatgaagctatcccgaattgcaattaaatgccgctaattattgagtttaggtagattgcaaatttaatccgaatttttggacaaatttgtcagcataacctgatacggtgtttgccagtcgagtattttaagcggtcgctggttaatttggagtaacgtcgtcgttaaatcttgagcactaatgtgctcaaaacgagtccctttaggataaaaataacgtaaattccgattaaagcgttcattactaccacgttcagctggagtataagcatggcagtaataggtcttaataccatattgtgattcaagtgatactagcccactaaactcagtgccacggtccacagtaaagctgtgcaccggaccattaaaagtggttaggaacttagttagtgcttcattaacagtcgctgtcgtccgatcttttaaccggtatgcccaaaggaaccgtgatttgcgatcgattaaagttaataaaactgccttactatgcccacgaggaccaacgactgtatctagttcaaaatcgccgatgcgcttacgttgattaatcatcatgggacgctgttcaattgatcgccccaaagattgattatatttggatcgttggtcaacgttacgccgttggcgtacgccatgttcaggtagatcattcaaggagaaaccaattctcccctgatttagccaattataaatagatttagtagctagtttaaattcgtgagcaatcattcctggtgaccagcttagacgtaaatggttgagaattttttgctttaactcatcgctcagcttagttttccgaccacatcgtgatcgcttgtattcggcatctgtttgtgctaattcagcctgataaggttgacatcgagataattcataagaaattgttgacggtgatcggttcagccgaacgcccatttggatattggacagccctagttcacaaaaggtttcgattttaattcgttcggaataggttatactagacaaaagatcagctcctaaaagatgggtttgtggtaaacaccattttaaaggaagctgatcttttttgtccgaacagcgttcggattaattttacaatctacctttagaaacaaacggcaacatcttttctgacagtttatctacgaatttcacagtcatttctccctttattgaatagaattgaaccggttcaatttcatataatagcacgcgattatcattttgacaatagcgcttacaaatataacctaaaaaagattgagtcctcctcatgaacaactcaatctttaaaccattgacaaaggccacctattcctaggtggccttctaattaatttcgcatattaaattcttacataatgtcaggtagccagtcactaattggctacgcacactagcatcgaatggctagtggagatgacgtgtgattcacgtcgcttttatttttgggttaattcaattatgtctaaattcttgtgtttctaaatatcttctcgtttaaacagcgtaagccgcctctttacactacttgtaactccatggttactccagttgattaaagtcttcaaataatacttgatactacagtgataagtgctgattaactttcctaagtataccatattttcagttcgaacacaaaatgaccataatctttctgaaaagaggctttctatttgaccaaaattgacctttgctgtaaaattcaatttatagactacagagtgattctactctggcttatataaggaggcaattcaatgttagtaccgacagttatcgaacaaacatctcgtggcgaacgtgcttacgatatttactctcgtttactaaaagaccggattatcatgttatctggtgaagtgaacgaccaaatggctaacacaatcattgcgcaattattattcttggacgcgcaagattcagataaggacatctcaatctacattaactcacctggtggttctgtgaccgcagggttagccatcatggatacgatgaacttcatcaagtctgatgtccaaacaatcgcaatggggatggctgcttctatggccagtgttttactttcagctgggacaaagggcaaacgttttgcattgcctaactcaactgtcttgattcaccaacctttaggtggtgcacaaggccaacaaactgaaattgaaatcgcagcgcgcgaaattttgaagactcggaaacgtttaaaccaaattttggcagacaactcaggccaaaccttcgaaaaattacaagctgacactgatcgtgataattacatgacagcgcaagaagcaaaagattacggtttgattgacgatattatggtcaaccaaccaaaatagagtagataataaaccggttctcttctgaggattagtaaaaaaaagggctagatcaagttgatctagccctttttttataccaaatttgttatactggcagtatcttaaaggagggtcttccatggatattagtgtgattaaaagcgagaatgtgacaaccaccggcggtattacaattggtcagccagatgcaccattaacatcaattgaatttatcaacgtcgcttgtccctattgccgcaagtggtttttaaaatccgaagaaacgatgactgaagcagtcaaagctggtcggctaaaacgtattatcaaaccttttgataaggataaagaggatctacaactggggaatttagcccatacctatttaccttttgatcaacccgaaatagtgctgcaaacactatcattcttgtttacgcatcaaaaaacatggcgtaatgatctgacaccagatgaatttaaaaaatacatcgatcaaaatctcaaattaacgccacaagataatgcagaaaatttagccgcaattattgctgaagccgatcgtgccaatattaaattcgtcccgaccatcattattggtgaccatatctttgatgaatcaattgatatgactgacttaagtcaactactaaaataaaaaacaggtgccccccctcggggcacctgtttttgtatgtacgataaagggttccaaaaaattcaatttaccatcaaatcttttggaaccctttatccgtcattttatgaaaaacgtgcattatccatttgaatcgcattcaaatgatgttcaacttcattcatttcttgacgtaattcatgatacttatcgcttgataaatcgagatagtttgtgcaagcaccaacccgttcgtagatttcttctttttgactttctgctttttcagttaaggtaacgtcaactcggcgttcatcgtctgatgcacgattccggcttacccaaccatcagcttctaagcgtttcaaaagcggtgttagtgtcccactatcaagttctaaatggtgccctaattctttcactgacatcttgccatgttcccacaatgcaagcattgcgatgaattgtggatatgttaatccgtaaggttttaataccttaccgtagaaatgattgtaagccttttgtgcgcggtaaatcgaaaaacagagttgttcatctaataatactggtttaaccatataattttcctccataaaatgtccttcagttattgtacttaattatattgtacaagtcaaatattgtacactaccgatttattttgccccttatccattcccctgttggtgggcttcggcaagttgattcaattttctgagccgatgattaatccccgacttcgaaattgccccactcggcattttttccccaagttccttcaacgtaatatctggaaattccaaacggagtagcgcaatctcacgcaacttcgccggtaaattatctaatccgacggtgtcgcgcaagtattcgatattttcgatttgttttgtagcagcatcaattgtcttattcatatttgcggtttcacaattgactaagcgattaaccgaattacgcatatcccgcacaatccgaatgtcctcaaacttcaacatcgcgttggtagcaccaatcacttgtagaaaatcagcaattttttcagcctctttcagataagtgatgtacccactccgtcggaaagtcgttttggcatttaagccaaaacgattcatcatgcgcgcaatatcttgattatgctcttcgtataatgaatagatttccagatggtaccggcttgtttcaggattattcactgagccaccggctagaaaagcgccccgcaaataagaacggacgcgctgatcttcattaatgacatcttctgacacctttgtatgaatggtaaaaccgtcctcctcaacaatatcaaggtcttttaaaacggtattggtatcatactttaagcgcacgatgtattgattattcttttttaacttcattttgcgacgtactagtaattcggattcaacttgataattttgtttcaataaactataaatccggcgagcaatcgccggattctcagtttgaacgtttaaaacaaattggtgattcatcaagctcagtgacccattcatccgaattaaagcggctaattccgctcgtgcatgttcaggatgcacttcaagttgcgtcagttctttcttcacttcacttgcatatgaggccacgattattcacctcgcttagctgtattgacctggaaagcaagattcataatttcactcgctactttttgtccattatggaacacaccatgatctttcaacttcaaaaagttatcggaaatcactcgacaacccaatcctcgtaagccatcaaagtcatgttcaaccggccagagaatttcgtcgtacttttgatgatccaaatagttttcagggacttgtgcggtattaaccaaaaccgtgtccacgaagttctgaccaagatgatcattcaacacgcggacgtgatcggcatcgttaaagtgttccgtttcccctttttgcgtcatgatattacaaatgtaaatcacttccgccttagtttgcttgactgccgcacctaagtttttaatcattagattcggtaaaatactggtaaacaaactgccgggtcctaagacaaccacatcggccgccaaaatcgcatcaaccacttgttgaacggcttcgggtgctgcagtatcatcttgatccgtttttgagacccaaacacgcttaatctgcttgcgtgctgcagtaatctcagattcccctgttaactgggtgccgtctttaaattcagcattcaacgacagcgcaacattggccgcaggataaatatgaccgtcaaccgccatcatttctgataaccgttgaacagcatcaaaaatacctgattccatttcagataacgccgcaataattaaattaccaatcgcatgccctgagaaaaaggcatcgtgtgatttaaagcggtattgaaaaatatcgagcgttaactgtggtaaatctgacaaggcgactaatacattccgaatatcaccaggtggtaccacgttaatgtaatcgcgaataacgccggatgaaccgccatcatcggcaaccgtgacaattgccgtagcatccgcattctgttcacggagactctttaagataacgggtagtccagtgccgccaccaatcacaacgacttttggtcgtcgccctttaatgacccggataatccgattagtagctgtcatgaccggttaaccgtttccttgcgtttcttcatatcccggtgggtcacgtcaaccggataatcaaacgataaatcatcagccaatcgttgggcaagcgctactgaacggtgttgcccgccggtacagccaatcgcaattgtcacacttgttttgccttccttgagataacctggcatgatgtcttttaacagcccactaaattgttcgtagaacttttcagtcgctggctgcgccattacatagtctctaaccggttggtctaaaccgtttaattccttaaatgctggcacatagtatgggttcggtaagaaacggacatccatgacgatatccgcatcaattggtaaaccgtatttaaacccaaatgacatcacttcaatatggaatgacggattatctgacgtcttgaagacatgaaaaatcttttctcttaattgtcgtggtgacatggttgaagtatccaccaccatctgtgctcgattgcgaatttcagttaacaggcgccgttctttttgaataccgtccattaaacgcccctccatcgctagtgggtgggaacggcgtgtttccttgtatcgcgaaaccaattcctcatctgatgcatccaagaagagaatcttagtcgtcacgaattgggtattatcaaggttagcaagcatttcaatgatctcatcgtaaaaagcacgtgagcgcaaatcaatcactaatgcaatcttagtcactttgccggactccttaaccaattcccaaaacttaggtagcaatgtcggtggcatattgtcgacacaaaaataacctagatcttcaaaactttgcatggcaacggttttcccggcaccactcatccctgtaatcactactaagttcaatgtatctgtcatcagaccaccccttaagttttcgcttttatcattgtaacattcctggtgtgtcattgaaagctgtcgaaactctcgacacgtgttatttaatgctattaaaccgagttcattcctaatgtctaggcatttgaaagagcttattttttccataaaaaaaattgcagaacaatcaaattgttccgcaatcattaaatttagagactataaacgtcttgcaaatgcgatgatgatggcattaatcccaaagaaagcaaagtaaaaaccaactagggtcaccatcgttacggcagtcaccactggatccattaacaataagatcccaacgattacgcctaagatattcagaatcatcgaaacgatgtataggcctgtgttaaattgcttgagatggccgacattcaataatgccacaattgaatcgaacaagaaccagaatgcaaagatataacctaaagcagccactccagctggaatattcaagataaacaaaattcccaaaatgacatcgacaatggcatcgaccaacattaacgttgcgcgcatccctgtctcttgacgtaaccgactatatgcactgattttggcaattccccgaataatcgccgcaatcgcaatcacgattaccaaaccagataatgtcttacctggttgattaaacaagcaatatgcaacgattaagaaaataatccccgtcataaattctgaccaatcaaagtgccattcattttttctaaacattcccaatcacctctcgttgttaatacctttatgatactttttttacggacaatctacaactaaatttgacaaaacaaaaagtgggcggttaagacagcaatcattctgtcttaaccgcccgctttttaaacgcattctatcaaccatcttctggttaatcctgagcggcaattgtgcgtgctgtatcgcgttctaaaacaggttttaaatattggcctgtatagctttcactgacgttggcaatttcttctggcgtaccggtcgcgacaattgtcccgcctttatcgccgccttctggtcctaagtcaatgatgtgatcggcagtcttaataacatctaagttatgttcaatcactaagatcgtgttaccttcttcaactaaccgttccaaaacgcccaacaagcgcttgatatcgtcggtatgcaagccagtcgttggttcatcgagaatgtataaattcttacccgttgattgtttctgtaattcagaggccaacttcatccgttgggcttctccacccgataaggttgtggcagactggcccaatgtgacgtagcctaagccgacatccacaatcgtttgtaacttgcgggcaatcttgggaatgtttgtgaagaagactgtggcttcaccgaccgtcatgtctaagatttcggcaatgttcttgcccttatagacgacttccaaggtttctgaattatagcgactgccatgacagacttcacacggcacatacacgtctggtaagaaattcatttcaatcttgataatgccgtcacccttgcaggcttcacagcggccacctttaacgttaaaactaaaacggccttttttataaccgcgtagtttggcttcattggtttgcgcaaacaaatcacgaatattgtcaaagacgccggtgtacgttgctggattactccgcggtgtccgaccaattggactttgatcaatattaatcagtttttcaagattctgataacctgtaattgttttatattgacctggttttgctgagttacggttcatcttttgtgccaaagcttttttcaaaatcgtattgactaaggttgacttgcctgaacctgaaacaccagtaaccgcgacaaattcacctaatgggaaatcaaccgtcagattcttcaagttattttcagccgcaccggtcacgcgaatcttcttgccattgccttgacgccgttctagcggtactggaatatattcggaaccggctaaataacggcccgtcaatgatttcggattatgttcgacttcagttggggtcccagcggccatcacttcaccaccgagttcaccagcgccgggcccgatatcgatcaggtaatcagccgcgcgcattgtatcttcatcatgttcaacaacaattaatgtattacctaagtcgcgcatcttcttcagtgacccgatcaaacggtcattatcacgttgatgcaaaccaattgacggttcatcgaggatgtagagcacgccagataagttcgaaccaatttgcgtggctaaacgaatccgttgggcttccccaccagaaagggtcccggctgaccgactgagcgttaaataatccagaccgacgttaatcaagaaagttaaccgatcatgcacttctttcaagattggtttggcaaccacactgtctttttcagaaagttcaagttgatcgaagaatggtaaagcttctttgatggcgttgtctgaaacggcagcgatatcttggccgcccactttaacagccaaagcttgtcgatttaaacgagcaccatgacaggtttgacacgttaattcagtcatatacgtccgcatttgcgtccgtgtgaaatcactattggtttcacgataacggcggtcaatattggctaatacaccttcaaacggcacgtccacatcacgcacaccaccgaaatcattttcataatggaagtggaagttcttaccctgagaaccatttaagataatgtctttttggcgtggtgttaatttgctaaatggtcgatccatgtcaattttaaatgacttgcaagcttgttcgagcatctgtggataatattgagagctaattggattccaaggcgcaatggctccttcgtgcaatgtcttgctggtatcaggaatcactaaatccatatcgacttctagcttaacccctaaaccatcacagtctgggcaggccccaaacggtgcgttgaacgagaacaagcggggttctaacgcgcccaccgtaaagccacagattgggcaggcatagtgttctgagaaaagtagttgttcgccaccgatgatatcggcagtcgcatacccttctgataagcgcagagccgcttcgaacgagtcaaataaacgggaccggacaccgtctttgacgacgattcgatccaccacgatattaatgtcgtgttttttattcttatccaattcgatatcggcactaacgtccatgacttcactatcgacttgaacacggacatagccttctcgttggattttttcaaatacttttttatgttgcccttttttgccacgaataatcggtgacatcacctggagtttcgtcttctcaggtaacgctaagacacgatcaaccatctgttcaacggattgactactaatttcagtcccatcgttcggacagattggatgaccgacccgcgcccataaaagccggagataatcattaatttccgtgactgtcccgactgtcgaacgcggatttttagacgttgttttttggtcgatcgaaatcgcaggactgagcccatcaattgaatcaacatctggtttatccatctggcctaagaattggcgcgcataagccgataaactctcgacgtagcgccgttgtccttcggcatataatgtatcaaacgctaacgaactcttcccagagcccgacaatcccgtcacaaccaccagtttatcccgtggaattgtaacatcaatatcttttaaattatgcgctcttgcgccatgaatgacgatcttatcatttgccatgctttacctcttttaatcaatttcactcttaatctctaagatggtatcccgtaacgtagctgcctgttcgaagtccagtttcttggccgcattccgcatttgttcagataaccgttctaccatttctagtttttcagctttcgacatactatcgaaatcaatctcgttggtcatcttgacttcttcagggtgttcgactgattgaacaaccgaaatcgcatcccgaactggtttgataatcgtcttcggcgtcatgtgatgtgcttcgttgtaggcttcttgaatcgaacgccgccgcttggtttcatccattgcattgcgcatcgaatcggtaatcttatcggcatacaaaaggacttgcccgttttgattccgagaagcacggccgattgtttgaatcaatgagcgctcgctccgcaagaaaccttctttatcggcatccaaaatcgccactaacgagacttcagggacgtcaatcccttcccgcaacaagttaatcccaattaagacgtcaaacttaccaagccgtaaatcacggataatttccgttcgttccaaagtcttgatatcactatgcaagtaacggactttaatccccagttctttgagatagtcagttaaatcttccgccatcttcttggttaacgttgtaataaagacgcgttcgttcttttcaatccgatcattaatttcgccgaccaaatcatcaatctggcccataatcggccggacctcaatattcggatctaacaagccagttggtcgaataatctgatcgacctgaatatcggtttgttcagcttcataagggcctggagtcgcagaaacgtacatgatttcattgacgtgttcttcgaattcaggtagcgtcaaaggccgattatcaagcgcacttggtaatcggaacccataatcgattaacatttgcttccgggcacgatccccgttatacatcccgcgaatttgcggcatcgttacatgggattcatcaatcatcatgattgaatctttcgggaagaaatcgagcaacgtataaggtggttcccccgccgcacgatcctccatgtgccgtgaatagttttcgatccccgagcaatagcccatttcttgcatcatctcaagatcgtaattcgttcgttgttccaaacgttgggcttccaacaacttgccgtccgccttcaattccgttagtcggccttctaattcagccttgatactcttaatggctttttccatcttttcttcactagtcatgaaatgcgttgctgggaaaatcgcaacatgttcgcgttcaccaatgacttcaccggttagcgcgtcaacttcaacgattcgatcaatctcatcgccgaagaattcaacccgcaacgcatgatcatcacgtgaagccgggaaaatctcgaccacgtcaccacggacgcggaaacggccccgttggaaatcaatgtcgttccgttcaaattgaatatccaccaattgacgcaataagtcattgcgctcaatctccatccctggccgtaacgaaaggacgtgatcttgatattcattcggatcacctaagccgaaaatacatgaaaccgacgcaactacaatcacatcgttgcgttccaacagcgcactggttgctgaatgccgtagtttgtcgatttcgtcgttaatactcgaatctttttcgatgtaggtatcacttgaaggcacataagcttctggttggtaataatcgtagtaactgacaaaatattctaccgcgttattcgggaaaaattgcttaaactcggcatagagctggcctgccaaagtcttattatgcgaaatgatcaatgttggtttgtttaaattcttgatgacgttcgacatcgtaaaggtcttcccggtcccagtcgcccccatcaagacttgtgcttttgcacccgcctcgaagttcttagttaacgtttcaattgccgctggttggtccccagctggttcatagggcgccactaaatcaaattggttatcattctgtcgttcaatcatcaaaagcctccattaccatttgctagcgataaaagaagacgccgggtagaagttgccctccaccataacgtctacttaccgattttataaagaataatattccttgtcctttaagtcattcactattctaccacaccgaacatactttcgccagagtgctgattaaagagtgcgtcattaagcggttatcctttgaggattagcctaaccagacggattagcgacgcagtcgatgatgcggctggtgtagctaaccggaaaaggatgcttaatgaaagcacgtttcaactaaagtgtggaaacgtgctgttgtcagtagattcctgcgctttgctacacttgtcaaatcgccgcttatagcgtcaattcgccaagttaggcaaatgctctgaatctgagcgactgacaacggcactctattccgctagcgtctgtctcactaattgggttagcttccctcgatctgcgaagtcttcactcagtaaatctggcaagatttcttggatgaaataacgggcgcatgcgagattttggtattgcataatcgtttttaaactttccgcaaaaatttctagaaaagcattctcaggattacctttttcaatttcaccaaaagactcgtagagtaaatcaatcttatcggcaacggctaataattgcccttccaaagtttcatcttttccttcactcaaacgacgttgataccgttcttgtaagaaatctggaatttcatttttaatgaagttagcggttaatgaactttcgacattggccaacatcgtccgcaattcatgcgttgcgtatttgaccggcgtcttaatatcgccgataaaccgttccgtataatcgtggttcagtgcgcgttcgtacagcacttgccaattaatcgtttgcccattttcttcttcaatatcgcctaataattgcgcaatttctgctactttaaaggagtgcgctgcaacggaatgttcttgatatttaaacaatcctggtgcgcgatttagtgtctccaaattattcaaaccttgcaaatattgatgcatacccataccaaactacctcccttttcttacaaaaatagaccgactaacgcagtagtccgtctatttgctgttctttattataggtaagttatcctgaaatgtaaaacagaagccctatctattttacaagttcatgaattgctttttcgaagtttgctaacttcaaatcagctgttgcggcatcatcagcggatgtcccaacgtagaatttcacttttggttcagtcccacttgggcgaatcgcaatccaagtgccatcttctaagtgatatttcagaacattagatgttggtaaattgatgggttcagtatgaccgtccgcaaaagtttctgtttgtgtttggaagtcttctgctgaagcgactttgatgccggcaaattcaactgggctttcttcacgacatttaaccatcaagtcagccatttgttgtgggccattgaccccttcgaaatcaactgcagtcgtttgttcagcgaagtagccgtattccgcatataattcttgaatgccatcatacaaagtcttaccgtttgacttgtaataagctgcaacttccgctaataagaccaatgtttgaatcgcatctttatcgcgaacgaatggtttcactaagtagccatagctttcttcgaaaccaaacatgaaggtgttttcgtctgtgtcttcaaagtgttgaatttgttcagcgataaatttgaagccggttaagacatcaatcatcttcacattgtagctcgctgcaatcttcgttgccaattctgttgacacgattgacttaacagccgctgcattggctggtaatgtgccagcatctttactagcttgtaaaatataacgtaataaaacagaagcgatttggttcccagtcatcaattggtaactcccgtctggttgacgcacagcggcgcccaaacggtcagcatctggatcagtcgcaatcaacaagtcagcttgttgtgctttcccgagttcaatcgccatatcgaatgtttgtgggaattctggattagggaatggtgtcgttgcaaattctggatcagcaaccgcttgttcagcgaccattgtaaattgttcaaagcctgcttgacgcaatgcgcgttcaccaagtactttcccggtcccatgaagtggcgtgtaaatcaatgacatggtcttgccgactgtgtcgaccaattcttgattaatcgtgacttgcttaacttcagctaagtaagcttgatccacattttcgccaatcaaagtcattaagccggcttcgcgcaatgtgctttcatcagccacttcaatcgcaaataaatcggttactttgcggatataacttgtgattaaatcggattccttaggtggcatttgcgcgccgtcttcgccataaatcttgtaaccattgtattgtttaggattatgacttgctgtaatcatgataccggcataggtatgtaagtgccgtacggtaaatgataattcaggtgttgggcgtaaggcatcaaaaacaaacgttgggatttgatgttgacctaagacccgcgctgcttcgtgcgcaaatgtttcagattgataacgtgaatcaaaactgatagccacaccgcgttttttagtcgcttctggtaatgttttcatgaattgagcgaggccttctgtggcttgacgcaccgtataaatgttcatgcagttgatcccagggcctaaaataccgcgcatcccagctgtcccaaattccattggaacgctaaatgctttttctaatgcatcatggtcgtttgccatttcgttaagtgctttttttaaaggtaaatccatttctgtttgattattccaaattgcataattatcttgccagctcattgtgtaacccccgcattttagtctaaaagctagttctaagtataccataatcaaccgctttcctaaagcatcggttgtacggtaatgcgcaccaagctaattgtctgggtcgattatttaataatgcttgtccttctaaaaattaaaatttttcccaaaataaaaaaacggccgactaaaatttagtcgaccgctggaaatgtgcgtcataagccacatttttaggttaatcctcaaaaataaaatcgtttcgaacgcactctaatcgtgcttcctcgaactgtcttttctggttaaccctgaatgtcaaacgattgctaccgcaatccttcgccattctgtgttaatcctcggaagctaaccggctgccgtcgcactctagatactttgtaagtatttaaatacttcttggcctgctatgccgccgtcgccaactgctgttgtaatttgacgaagatctttttcacgaacgtcaccaattgcgtagatacctggaacactggttgccatgtggtcatccgttttaatccaaccggcatccgttagaatccctagatcaccaaaggcactagtcattggttcaatccctacatagatgaagaccccacttgcagcaacttctttggtttcaccagttgccttatcaatgtaagtgacaccggttaccttcttgtcgtcaccttcaatagttgtcacttgtgcattccagatgaagtccatcttgtcgttagcaaatgcacgatcttgtaaaatcttttgagcgcgtagttcatcacgacgatgaatgactgtcaccttgctggctaattgcgtcaagtagaggccttcttcaatcgctgaatcgcccccaccaatgaccacgacttctttattcttaaagaaggcaccatcacagaccgcacagtatgagacaccacggccgccgaattcatcttcaccggggatcccaatcttcttgtgttctgaacccgttgcaatgatgattgagcgcgcttcaaagtcgccttcatccgtgtgcacgagtttcatctcgccttgcagttcaatcgagttaaccgtgccatagccatattcagcaccaaattgagtagcgctggcatacatcttttcgcctagttcagggccaaggattgatttaaagccgggataattttcgacctctgccgtattattcatttggcccccgtaaatcccgcggtccaacattaatactgataaattcgcacgtgaagcgtataaagcagcggtcatcccaccaggtcctgcgccaatcacaattacatcataacttttaaccatgtctattatccccttacttttaaaaagtgctcgttcttcatagaatgtatcttacccgttatgtaaaaaaaagtctaccaaactgttttaccagtttgatggacttgttggtttcaattcttgtaataattcagtggcttcggcatcgaaatccgaatcgtcactctgtaaataagcagtcgctaattcataactagcctgcgtctgatttaaaaaggcatacgccgttgctaaaaaatattgtaactcaggatgactctgatagttggcggttggaatttcttccagaacggtcgccgcaccatgatagtcgccaaccgattccaaacaaatcgctaattggcacaccacaaagatgtaatcatctttggtcttagccagcgactttgcccgttgtaaacacgttaatgcgcgcgtatactgaaatcgttcaaacgcctgcatccctctgtcaaaataaaactcacaagttggtcttacagataccaaatcgcccataaagtaatcggttctcctttagcctttttctcaacgctaatcatcataacacactctgatgatgggtgcgatacccattcaaaatgatgccgctttattcgttaaaaagttttagacttcatcaaaatcgatttcaggtttacctgaacgccgcattaaatacgcaatttcagtcttaatatcacaatcttcatacaatacattatagatggcccgtgtgattggcatatcaacagaacgttgttgagccaattcataggctgctttacatgttgcgaccccttcgacgaccatccccatattggctagcacatcagctaatttttgacctttaccaagtgcatttcccgcacgccagtttctcgagtgaacactggtcccagtcacgattaaatccccaacaccggataatccgataaaggttaatgggttagcccccatggcaacgcctaagcgggaaatttcagctaagccacgcgtcatcaaggcggccttcgtattatctccataaccaagcccgtttaaagcgcccgcgccaagtgcaatgacgtttttcaaagcagctcccatctcaacaccaaccacatcagggttggtatataagcggaaataatcattcatgaaaatctcttggatccattgggcttgaatcaagtcacttgatgcggcagttaaggtagtaatatctttttgtgcgacatcttcagcatgactaggacccgataaaacaacaatcccattgcggttggtttctggaatggcttctgtcaagacttctgaaatccgtttgtgcgtgccttgttcaagcccttttgaagccgtcacaatcacgggtttcacttttttcgcaatcatcacaggaacaatctgttccgccaccgcacgaatcgcttgtgttggaattacaaacaagacaacgtcaacttggtcaagtgcaacgttaagatcaatcgttgcgtgtaactggggatcaattttaaaatctggtaaataatgtgtattggtatgctgttcatttatttcagcgacttttttaggatcattgccccacaactcaacttggtggccattttccactaataagtttgctaagatggtcccccatgaaccggcccctaaaactgcaatttttactgtcatctgataattctccttttaaacaaatccctatttctgttcttttgcttgattgccggttaaataatccggtaactgactgtgcttacgccgccaaatccaaagaccaattgcaccaaagaataagacgagtgagacaatctgcgatacccgcaatggaccgatgaataaactatcagtccgcatgccttcaatgaagaaccggccaaacgaataccaaattaaatagctaaataagatttcgccttgtttaaaccaaccagttcgatggcgaatgctcatgatgataataaaccctaatacattccatgctgattcatataagaatgtcggctgacgatacgcaccatcaattaacatctgttggatcacccaatcaggtaagtgtaacgattggagaaagtgcaatgttgttggcgccccataggcttcttggttcataaaattgccccaacgtccgattgcttgtgcgatcatcacggttggtgccgcaatatccaacactaaccaaggcgatagtgcatgacgccgacaatagataatgaacacaatggcagctgcaatcagtccaccgtaaatcgcgatcccgccgtgccaaatctgaataatttcgccgggattggcttggtaatacgaccattcaaaaacgacgtaatacagtcgggccccaattaaggcaaatggtaatgcccataaaattaaatttaaaatatcatcttcactgacattgcgccgtttagcttcctgtaatgccaatccaacggctaaaacgaccccagttgcgataatcacaccataccagtggatctccaatgcgcccaatcgtaatgcaatcggatttaatgcgcctaatagtagattcaaattattcactccttttgtaaatgtgctttcatcaaaacgtacttttcaagctaactttctgcgcttagcgtcgtgaagcaaacaatcgactgcgtcgcttatcgcttcactgtgctaatgcgcaaaagttggacaagcttgaatgcactcttatccgaaacgtgctccgtaagccatatccttccggttacccctgagtgtcaaacgattactgacgcaatccttcgccattctgtgttaaacctcaggatatacccggcttactgcgcactctaaaaaaaactagtttgcatactgtctttctaacagtatagctcaaactagtcattagacctaccatatttaacgaacttttctgacttttaactattcttcttcatctgaattggcttcaattaacttgcctagattggcttcgaaggtcttcgttgcatcatagcccattgatttagcccggaagttcattgccgccacttcaataatgatggccaagttccgcccgactttaacgggcacggtaatcttcggtacagggacgtcgaaaatcatttgttcttcggtatctgaacctaagcgatcgtatttcttatcctgtgaccaattttgcaagtggacaattaacgaaattgacgtttcagcccgcaccgcaccagcgccaaagaggttcatcacatcaataatcccgatgccccgaatttcaagtaagtgacgcaaaattgcaggtgcttcaccgaccacggtttgttcatcttgttgataaacgtcgacccgatcatcagcaatcaaccgatgaccccgtttgactaattccaatgccgtttcgctcttcccaacacctgaatcgccagtaattaaaacacctaaaccgtaaatatcgactaacacaccatgcattgagcgccgttcagctagcttcccttccaaataatcggttactaaactcgacaaacgcgttgtcgataaattcgaccccaacacgggaatccccgcttcttcagctgctttaagcatttccattggcggttctaattggcgcgagaccaagaaacagggcgtatcttcagaagccatccgacgcataatcattaaccgttcttctggtgtcatattttgcgtaaatgaaacttccgtccgtccaaataattgcacccgctcgtaagggtagtaattaaagtagcccgttaattcgagtcctggacgggaaatatcactcaccgtcactgctttattttttaaatgtgcttcaccggcataaacttgtaattttaaatcggtgactagtttttgaattgaaacactatcagccatgagttacccgtccttcattttcacttatatcctctatcatattgcttttagggtgatttttcaactttaatgtaggcgttttcttatctaaacaaaaaaacgggaccaatatcaatcttaattgacgtcagtcccgctaactttttaataacgctctctcacaaattgatttgtaataatcgtattggcaattgataaaatgatagccacgatcacggctgctccaaaacttgtaaagctaaagtgggcgccgacgaaaacagcggtcaattctaacataatcccgttaatcacgacactaaacaaaccgaatgttaaaaacgtaattggaaatgagagtaagttcaacaatggtttaataaagatgtttaaaatcgataacacaatgctggcgactaacgcgatccaaatgttttcaacatagaataaattgggcaataagccagaaatcgcaatgaataacaaggtatcaacaattacgcgtgtccaataccgcattagaaatcactccagtcatcatcgtctactttgacatcacgggcttccttgcgttgacggctaccttgatgtgctgtttcttgataagaatagtcttggtagtcatggcaccagtctgcatgccgtggacgtctacttgggccagcaattgcccggtagatgaagctgacaattaacccaatcacaatcagtggtagcgcaaattttaataataacagtagcgagccaataacgagactaaacacgccaactgccgccataatggcgataatgactaataaaatcattaaaaaaggcattaaaactcactccattcactttcagaatcatgtttactctgacgtggccgttctggaatcaccatcactaagatgatgtagaccacaatcccagggaacgctgctgaaaacattgagaatacaacatatagaattcgaactaatgtcgcatcaatattaaaatactcagcaatcccgcccattacaccagaaatcattttgttatctcttgatttataaagtcttttccccattgttaaaacccaccattccttaattttttagttatcgttgtctttcaataaaatattaccagttgtcgtgcttaatgttaaacgagctgcctgttcattgtcgttacggccaagttgtaacatttgattccccgtactttgccgttgttcgatggtttgggtgtttgcaagccgatttttaatcatcccaaaacgcgtgcgggcatcaacagtcattgccaaagtttgtggtaaagctgtcttgattgtgccattcacagattttgcttttagatgttgtaaatcagttgtcgtcaaagtgttcttgatatccccgttgaccgttgaaacactcgcatttaaaacttgcgcttgaatcaataggttaccgttgacggttgttgcgagtaaatcatcgtaacggccttgatcaaaggtaatgccaccgttgacgttttcagcttccaccattgcagcgttggtgctgattaacgttaattcaccgttagtcgtcttcaagtaaatatcccggccggtaaagccatctaattcaacatccccgttcaataacttcacattcgtttgtaagtagttattggctggtaagtagaacgttaagtccgcttgaatccgtttattcggcacttggaagaccaagtcggcatcagtcacatcaattgtactgcgcgcttcaaaagcagccaatggtgttgcttctgccattttaccatataacttcacttgcgctgcgactttgacttctggacgatcccagatttggaaatgtacactaccgttagccactttgacgttaatcatttctggtgttacgtcagaataaacgaattcatggctgaacttttcagttgccaaaccaggcaccttaaagtttacttctttccaatccacattatccatgactgttttggcagtattcttcacgaacttaccaaagtgtgtgctagcttcgcctaacttatcgctcaattcatcaaatgtttcactggcattttctttccagtcatctgataagcctaatttttctgaccattgatttttggtcatttggcggcgttctttttcgatttggttgagttcatccgtcagtgcttcgcgtttggcttccaactcgtcgacttcagcttgcttttgtaataagccagccttgagtgtttgccgttcggttgctttttcactgcttaaactatctaaatcttccatcgtatcaaggacagtgacttgttcttgatcagcgtgcattgtttgcttcaaatcttgcaactgccggttaacgccggaaaggttaacggttaattcgtgtgccttttcttcaattgcgcttttatcagcggttggttgttcagtttgctccgttgctgtttcagttggatttgattttacatcttggtcatttttggctaaattttctaataagactaatgcttcttctgaagttaaaataccttggttcactaagtctaaaattcgttgacgttcattcattgttttgacctccattgatcattcgttgtactgtttcacttgactatgactctattatgccgattttacagtcgattgtcataggtccaaaggttgatttttatttaggtatcaagagtgagaacaaaaaaagcgcaggacaaaattatttttgtcctgcgcttttttgcttaaacgatttgtcctgtgtaaggttcgccggcgacaaattggaaatcaaaggttgctaattcatccacactggttagacattgggtaatccctttagccaacattaggttgatgggattggcttgtaaatcatcttcacaaacaaagacgattggtttatgacaggcattcaagtagccgacttcaaacgccgttcccgtatcttcgtcttgcatatcccataacacaactgccatgtctgctaaatccattgctgtgatgtcgttttgatacgtttggttggcccattcgtaacccccgaacatgccttctggatcatgatcttctgtcacacccttgtattgatgctcctgtggactatgaatataaccaatcgttgggttttgttttaaagccgcgtgtgcgcgttccactaatgaggcctgtttaggtgtaaaccaaccgccagctaagtatatttgtttttgcattatgattctcccactaaaaaagcgacgagcaagtcgaccttgtcatcgctttttaaaatttttaattgaattgtttagaattcatcttcttgtgcattggagtttaattccactaccttaccggttctgaggtagacaatccattcacagatgtttgtcacgtaatcgccaatccgttcgaggtagcttgcaactaacatgtagtccatgctcccaacgacggtttctgaatcacgttgcatttctttgatacagtcgtcataaatattgtctgaataagcattgattgcaacatcttcatcggcaattttgatggccttcttacgatcttctttgacgtaagcatccaatacctcttcaaccatttgtttaactttgtctgccatatccgcaatatctttttcgatatcagggacacgggtattacccttgacccgaatcgttgatttcgcgattgaaacggcgtggtcacccatccgttctaaatctgaactagccttcatgattgtgacaatcacgcgaaggtcagttgagaccggttgttgaagtgcgattaactcaaaactcttacgttccaaatccgtttcccgttcattaatcttatgatcgtcagcaatcacctcgcgtgcgagttgcttatcgtgattaatgaaggctttaacagatttatagatggcttcgttgaccatcatccccatttcggagaagcgaacgtgtaaatcatttaactcatcttcaaaaagtcgtctcattgtggtttcccttctttcttagccaaaacggccactgatgtaatcttccgtttctttttcggttgggtttaagaaaatcttcttcgttggtgcgtattcaatcaattcaccttgtaaaaagaatgctgtcttatccgaaatacgagaagcctgatgcatattatgcgtcaccattataatggtatactgttggcgcaattctagcaacatattttcaattttagcactcgaaatagggtctagcgcagaagtcggttcatccattaagatcactttcggtttcacagctaacacccgagcgatacaaacccgctgttgttgaccaccagaaagtgataaagcactttcgtgtaacttatctttgacgtcgtcccaaacggccgcttgtttcaaactactttcaacggcttcatctaagacgcgatgatctttaacaccggataaacgtaagccgtaaacaacattgtcatagattgaaaatgggaatgggttcggttgttggaacaccatgccaacttctttccgtaacttaacggtatccatctcaggcgcataaatatcttggccattcaataagaatttaccggtcaccttcgccgagtcgattaaatcattcattcgattcaagcagcgcaagtaggttgatttcccacaaccagatggcccgatgagcgccgtaatttcattttcaacaaaatccatattaatcccttttaaggcctcattcttaccatagaatagatgcacatctgaggattcaataatcttatttgccacggggcaaacctccttgcgtcctagccaaagtgaccagaaacataatcttcggccgctttaatcttcggccgggtaaacattttacgtgtttcgtcgaattcaagtgcgtgccctgaatggaaaaaggccgtgtaatcactgattcgtgctgcttgttgcatgttatgcgtcacaatgatgattgtaaattcttcttttaagcgaatcaatgtttcttcaaccgtgttcgttgaaattggatcaagagctgaagccggttcgtccaataataaaatatcgggtttcatcgcaattgcccgggcaatacataaccgttgttgttgcccaccagatagtgccaatgcgctctttcctaatgaatctttgacttgatcccacaaagcagcttgttttagtgacgtttcaaccacttcatccagatactttttgtctttttgtccatgttgtttcaaggcaaaagtgatgttgtcatagattgatttggcaaatggattaggccgttggaacaccatgccgatatgttcccgcatcttatacacatcaacgtcatcgctattgatgttcaagccccggtacataatcttaccggtcacacgtgtattagcaatattgtcattcatccggtttaaactccgaagataggttgactttcctgaaccagaagcgccgattaacgcggtaattcgatagcgttcaaattgcaatgatgcatcgtgcatcgcgcgtttgtcgccgtaatagacgtttaaatcttcagttgataaggcaatttcatgttttggttcatctaaatgtttgatgtgcgtttttgttaaatcgtaatctgccattattttctcctatgctgctgtcattttacggtagacacgcttgccgatgacccgtgctaaccagttaaatagtaaaacggcgatgattaagacggcagatgcgccagcagaaaccgcagtcgcatccggcataatcccttccgagttaatcttccaaatgtgcaccgctaatgtttccgcaggtcgcaatggattcaacggactcgcgatgtacattgggttccagttggtaaaatcaagtgatggggcactttgtccagctgtataaatcaaggcagccgcttcaccaaagacccggccagcgcctaaaatcatcccggtaataatgttgggtaacgcttctggaatcacgacatgcttaaccgtttcataacgcgataaaccaagtgcaagacctgcttcacgttgtgtgaagtgaattgattttaaagcatcttccacattccgcgttaacaacggtaaattgaaaacggtcaaggctaaagcacccgctaagattgaaaagcctagcttaaactggataacaaagaccaagaaaccgaataacccgaccacgacggatggtaaggaacttaacacttcaatcgcggtccgaacaacattcgtcacccagttcttcggcgcatattctgcgagatagatgccggcaccaattgataacggtactgaaatcaccatcgccaaaattaatagatagaatgaattaaacagttggacgccaatcccgccacctttagtaaaggtttgcgcaggtttcgttaaaaactgccacgtcacgtgtggtaatccgcgcaccaagatatagccgagcaaacttgctaataataatacgatcaaaccagcgatgagggttagcacaccggtggcaactttatcccatttttttgcatccattagcgacccattgctcccttccgaccaattaaacgaactaataagttaaatagtagtgacatcaataataagagtaacgccaatgaccaaagtgcattattggctaatgaacccatgaccgtattcccaatgcccatcgttaacacactcgttaacgttgaggctggggtaattaagttatgtggtaataacgcagcgttcccgatgaccatttggacggccaatgcttcaccaaacgcccgggccatcccgaaaacaaccccggttaaaatccctggtgtggctgcttttaaaacgactttccatgttgtttgccaacgcgttgcacctaaagcgagtgaggcttcgcgataatgccgtggcacactcttgagtgcatcgactgtcatcgatgtcacagttggtagaatcatgacgaacaaaacacaagtcccggcaagaatcccaaagccactgccaccaaacaaatgacggacagctggtacaatcacggataatccgataaacccgtaaacaactgatggaatcccaacgagcaattccatcactggttgcaataatttttcaccccgcttaggtgagatttcagtcataaaaatcccagcgccaattgcaaacggtgttgctaataaagccgctaagaaagtcactccaaatgaccccataatcattggtaaggcgcccacttctggtcgaccatgactatctttcaaacttggattccaattagactgcgttaaaaagcggcctagattgattttatctttaaagaaggtcgctaacccttttgaagcgacgaagtagaaaatggcgagcacgatgaacacgattaaactaatacagaataaactgattaatttgccccgtgtttcacttttagctgcgcgtgatttcttaagtaaacttgctttaattggatccataattggccccctacttaacctttgtaattgtgccatcaaccgaccgttcaaccgtcatcttagcaactggaatatagcccatcttgccgacttgtttatgttgaacctcatctgataagacatacgccaagaaacgttttgttaacccagttggttgccccttggtgtaaacatgttcatatgaccagattggccatgcattagtcatcacgttttcatcggttggtgcaatgccgtttaatttaaccattgcaatcgaatcatctacgtatgaaaaagcaagataactgatggcccctggcgtgttcgctacaattgatcgcaccatccccgttgaatcttgttcttgagcgggtttagtcttgcgcgacttcatcacccattgttcaaacgtcgtccgcgtcccactaccttgggctcggtttactaaaacaaccggttgatctggtccaccaacgtcttgccagttatcaatttcgccactaaaaatcttcgcgagttgcgtcaatgttaagtttttaatccctaattgcttattaatgactggggtaatgccgacaacagccacgcgatgatcgaccagcttgtccgctttaatgccagccttttcttcagcaaataaatcagaattccccatctgtacagcgccagattgaatctgactcaagccagtcccagaaccgcccccctggacgttaatgaactgaccgctgtgatcagcactgtattgttcagctaacgcttcaatcagcggctgaagggctgatgagccgaccgccgttacggactgaccattttgtttagactggcaaccagccaatagtaataaactgaatgtgactaataagccaataacattacgtttgcgcatgttaatcctccacgaattccatttaaacctcgtaagttccattataaaaaaggtttgtaaaaactaagcctatcaaatgtaaattttgtgtaaatcaagcgtttggtagcttcaaaatgaattcactaccgacacctaattgactctctacggtcaactgcccctctaaactggcggtaatctcgctagcaattgctagtccaaggccggtcccgctcttatgggtcgcgcgcgcttgatcaacccgatagaatcgttcaaaaattctttcttgtaggtcacttggaatgcccaaaccggtatcgacaacgcggataacaatttgatctttttcaagttgcacggcaatcaccaacgagccgttttgtttattatacgtgatggcgttagcgattaggtttttcaagatttgattaaacttcattttctgaattctaatcgctaaatccgttggaatatcaacggagacgtgtaactgcttttgttgtgccttttgttgcatcagttcgagattagcctgcaccaattcacgtacattcacaagttgctcttgcgattggtccttacgatctagatgcgaaagcgccaaaatatcttgaatcagcgcagttaatcgcgtactttcgtcatagatgatttgtaagaattgcttttgcgtggcaggatcttccgccgcaccagctaacaacgtctcagcaaagcctgtaatagccgtcaccggcgtcttcaattcatgactcacattgctgacaaaatccaactgcatctgctcaacgcgccggacatcggttaaatcatataaaatgactaatgcttggaatttcgatttaaccgtattgagttggacaacattcgcatccacaaaccgttcttgattttgaatcaactgaatttcttggtgatgactctttcggtacctaaaagtgtgctcaatcatccgtgttaattcatacgtcttgatatcatcaatataggggtgtttctcagtaacaatcgtcgtctccaataaccgatccattgcttcattgtgcaaaacgacttcacgattttcgttaatcaccatgacgccgaccggtaaatggtcaattaggcggtcaaaactgccctgttgcatggcaatcttctgccgcatatgccgcatatcaccatttaatttattaatttcttgcgcgaggatatataatgacgcatctttttgaaaaataatcggttcgggcacttcttcatgccgaatatgatgaatattagcgactaaaattttcaagtggtcaaagaaatgacggcgttgccgccagaaacggtatagaaaaatccagctaccgattaaatagacaatcgtgaccgataaagcaatcttcggccacgtatgccagaactgttgctgaggcactactaagacaaagttgggccgatctgcttggtgtgcgtaaaacaaatacggttgcttattaactgtttgccgcgtactaaaattggcggcagaatgattccgattgacaatatccgtcactgctttttgcaactttgttttattcggcgattttggcgtcaaaacttgtaagccgttttggcgtaaccacttttgccgatcaaactgtggttgtttgatgattagcgcatagtcggcgccccgttcctttaacatcgcgtcttgttgttgggcaatcaccaaattgacaagcacaataaaacctatgtaaacagccactaaaatagtggctagctgataaaatctaaattgatcatgtttggtcatggttggggtcctccaattgataaccgaaaccacgcaccgtttttaagtaaactggatgacgcggatctgtttcgattttttcccgtaaatgactgacttgaatatcaaccattcgcgtttcggctggataatcaaagccccacaccgcatttaagagtttctcacggctttgaaccttgttaatccgatgcataaagtaaacaaggagttcgaactccttaggcgttaaatggagcttctgagtgccctttttagccacaacttcgccttcatcgaccattaagtcccctacttgtaaaatatcactagggtgcgtttcaacgactgctacaggctgtgccgtccgccgttcaattgcccgaatccgcgcgataatttcgcgtggactaaatggtttagtgacatagtcgtctgcccccacttcgaggccgacaattttatcggtttcgctatccttagccgttagaatcataatcggcgtttttaactttgcctcccgaatcttcttggtaacggtaattccgtctagcttaggcaacattaaatctaaaataataaaatcaaacgactgctgtaaagccatcgtcagcgcttgtgcaccgtcagttgccgtcatcactttaaaatgttcttgttccaggttatagcgtaataatgtcaagattgctggttcatcgtctaccactaaaattgtcttcattcatgccaccctttatttacttaattctctgggaataatacaacgcctaactcatgtggtgcatcagcaaaaattgcgccttcagccatccggaactcaccgtttaaatcttgaacctttaaatggcaatacgttggctgactttgaatcgcccgataaaaattatcgttatttgagacagcctcgccattacattcaacaattgtatcgccaacgaccaaccccattttagcagccggcgtttcgcgtaaaatccctaagataaagacgccatcgtagggtttcgtaaagtgcaactgccgttcatgggcactgcgtctactcaaccgccattgtaatgcacagcttagtactagcgcaactgtcaacatgccaataatccagttcggaaatgcaacggcaattaacccaaacccaactaacaacaagccaaagatcaaatagctattggcatttttagtaacaactgatttcattaagcctttgactgctttcaaactaaatcccaataacaatggcaagattaccaagctatatgattgatgcccgatatttaagaccggccaaaaacccaaacttggcatatcaattgcccctggcactaagaaaaagaccggcgcaatataaatttgtcgactcataaagaaggccgtcaaccgccctcgcttgctagtcatcacacgcggtgtcacagttgcctcggcatcccaacgttgtaaaacactattgatgacggtcactaacccaataatcaccaataattcagccaaaagacttgcttgaccttccatctgatattggggccatatgaatgttgcaccagcgtagaccaaagcactgattaaaaaggttgccgatacgttttgccatctagcagccactagcaaactcaaaatagcgattagttgatagaccagccaccattgcatattaaccatcgcccctaacactaaggtacagcaacttaaggctagccctgcgagtagcccatggcccacaaaatggcccacttctatccatcgtggattaatcgcaattctaaaggtcttccgttccaagctaattcgtctatgcgctaaccagccagcatacacaatcgctaaccataaaagtggtgccgttagtaatggtcgcaaaatatcaatgatcatcgtcaattcaacaaacccccagcgtctatatttaaataccgtgcgtgtttccaacgacacacgctcgatttccagctgccgaatttcgcagttatcccaatcagtatagcattttgcccccttaactgcctagggttcaaaaaaaaagagtgacgaacaatttaatgttcgccactctttcactaatttagtttaaattttaaggaaacgacgcattgagatgacagaacctaatgccccaatcacaatcccaatcacagccattgttaaatcaagttggaataagaaaattcctggtttcaacattgaataaccggctgaagccatgctgagtgccatatgacggtaaacccaaccataacctaagtcgattacaataatgggaataattaccccaagtaatccaacccaagccccttcaaaaaggaatggccagcgaatatacgagttagttgccccaactaaacgcataattccgatttcgtcgcgccgcgataaaatcgtaatccgaattgtattggaaatcaagaacactgccacaaagagcaataataaagtaaaaccaacgccccatttacggacgctactcattaccttgaacaacttcttagcgttgttcccaccataagtggcatcataaacgtatttcaattttttcgcttgtttagcgactttaatcgtttgacttggttttgtcgtacttactgtgtaaacatcgtacaacggattatcgtctccggtaaacatcttaaatgattgaccgtaactgccgacaaccttgtttaattcctttttacgacttgaatacgtcacttctttaacagacgccattttttcaagtttcttttgtagctgatctttttgtttacttgttgtgccccgttcaatcataacccgcacgtgcacatcattttcaatatcttgtgaaatcttgttaaagttgaagatcatcgcaaagaaaatcccgactaataacaacgttacggtaactgcactaacagctgcgattgacatccagccatttcgttttaaactcttaaaactatcgttgatatgacgcttcaatgttctaatcttcatagccgtagtcaccttctttttcatcacgaactaagcgaccgtcttcaatcgctaagacacgatgggtccgttcgttcaccatttgtttgttatgggttgccattaagacaatcgtcccacgttcattaattgcttctaaaatatccataataccatctgacgtttcaggatctagattccccgttggttcatcggcaatcaacacatctggccggttcacaatcgcacgtgcaaccgcgacccgttgttgttccccaccagaaagttcatttggaaagcgacgaatttcacccttcaagccaactagttcgagcacttctaatacacgatctttgattgcttgaggttctgcctcgatcacttccatggcgtatgccacgttttcaaacaccgttaaacgtggtaataacttgaaatcttggaaaacaacacccatcttacggcgtaagtatgggacatcgtgatccttcataccgattaaatcaaaaccagcgacttcgatttcaccactcgttgcttttaattgatggtacaacatcttaatgaatgttgatttaccagcaccactgggaccaacaatataagcaaattcgccgggttcaatcgttagcgaaagatccttaattgctgtcacgccatttggatacttttttgacacatttgtcattcgaatcaattggggacactcctttttttgtcgttatcattatttattgtcaatgaaaaccgcaatcttttatattatagcatgctatttattcaaataatcacaatttgattacatttatatttcaatttctttgcagctagtcgggattcttctgactcaactgccattgcagataggcatacataaatggatccaaatcgccatccatgactgcttgcccgtttccggtttcgtagtcggtccggtggtctttaaccatcgtgtacggatggaatacgtatgagcgaatctgtgagccccagccaatttcaagctgttcgcccttaatagcaaccgcttttttcgcctgttcttcttgttctttttgatacaatttagccttcaacatattcatcgcagtttcgcggttttgcaattgcgaccgttgcgcctgtgatgaaacaacaatcccagttggtaaatgcgttaaccgcacggctgatgatgttttattgatatgttgcccaccagccccgcttgaacggaagacgtcaattcgtaagtcttcggtgcggacttcgatatcaatcgaatcatccaattccggcatcacatcgactgaacaaaacgaggtgtggcggcgcccagctgaatcaaacggtgaaattcgtacaagccgatggacccctttttcagaacgtaacatgccatacgcgttgtgccctttaatcatcaaggtcacactcttaatcccagcttcttcaccggcctggtaatcttctgtttcaacggtaaagccgtgtgcatctgcccagcgtaagtacatccgcaaaagcattgaaccccaatcctgagattccgtaccaccagcaccaggatgcaattcaacaatcgcgttattgctatcgtagtcgcccgatagtaattgtccgagttcatattgttgcatctgagcttgaacagccgtcaaatcagcttcaaaactcgtctggagttcagcatcgggttcttcttgtaatagctctaatgtcacttgtagctcttctgattgcgcttgaagttgcataaaagcgtcgtatttttcctttatggcgttattttgatcaattaactgttgggctgctttttgatccgaccagaaatcgggatccgccatttgcgcttcattttgcgcgatgctttcttgcaggccatctaagtcaaagtgaccccctaaattgcgttattttagcttcaattgcttctaaaagatgttttgcttcacttaattccatattttagtccctccactattttttcccattaaaaaatggctaagttaactacctcagccattttctacgcgttagcgtcgaatattttgacggatttccgccttcatgaagagccgggttgtatcgtaatcgatgtcgctgatcatttcttcaaacatccggtaaccttcttcttgatattcaaccaatggattcatttgaccgtagccccgtaatccgattgagttgcgtaattgatccattgcatcgatatgatcggtccagcgttcatctaccacacggaggataacgactttttcgaattcgagcatttgatctgcatctgctaattgtttttgttttgttgcgtaattcttttctgcaaaggtcatcaataatgattcgatttcttcagcagtcttaccttgtaatttttcaattggtaattcttcttcactgaccattgaagttgtggcaaatgcgtggattgcttctaattcccagctccccatttcaccttgtgtatgcaattgcacaatccgtttaacggttcttgaaatcattggcatgataacttctttcaaattatcttctgccatgatgacctgcatccgttgtttatagatgacttcacgttgttcacgcatcacatcatcgtattgaagggtttgtttacgtgtatcgtagttattcccttcaacccgtttttgtgcggcttcaacttgacgcgtaatcatcttactttggatcaccgcatcgtcatctgaaatcttcatccggtctaggaaggctttaatccgttctgaaccgaaacgtttcatcaagtcatcttccaatgacatgtagaattgtgtgacaccaggatccccttgacgaccagcacggcctcgaagttggttatcaatccggcgtgattcatgacgttcagtcccaataacagccaaaccgcctaaatccgtcacaccaggtcctaatttaatatcagtcccacgaccagccatattagtagcgatagtgaccgcaccacgttgaccagcattcatgataatttcagcttctttaaagtgattcttagcattcaaaacagcatgtggcacgttattttcatctagtaatcgcgatagtaattctgaagattcaaccgcaacggtcccaaccaatactggttggcccttagtataacgttccttgatatcttcaataaccgccttaaatttactttccaaagttggataaagcacatctggtttatcgattcgggcaattgggcggttagttggaattgagataacttccatgttgtaaatttcgcggaattcttcttcttcggtcttcgccgtcccagtcatccctgataacttgttgtacattctaaaataattttggtatgtgatattcgccattgttttggtttcatcttggatttcaacgccttctttggcttcaatcgcttgatgtaatccatctgaataacgacgaccatccatcacacgacctgtaaattggtcaacaattaggacttcgccttcttgaaccacataatcaatgtcttttaacatgatatagttggcccgtaatgattcgtccaaatgatgcgtcaaggctgtattttcagtgtcatataaattgtccaagccgaagttagcctcagctttttcaatccctgattctgttagactgatggtctttgttggccaatcaatcttatagtcagtttcttcttttaaagttttaacaaaacgatcagcacggatataaagtgctgttgacttttcagcttgaccagaaataatcaatggtgtccgcgcttcatcaattaaaattgaatccacttcatcgacaatggcaaagttcaatggtcgttgaaccatttcttctttgtaaaccaccatgttatcgcgcaagtaatcaaacccaagttcactattcgttgaataagtgatatctgagttgtatgcgtcgcgtttttcttctggtgtcttagcatttaagtttaacccaacagaaagaccgagccagttatataattcacccatttccgttgcatcacgacttgaaaggtattcgttgacggtaacaacgtgaacgcctttaccagccaatgcatttaaataaacaggcatggtagccgttaaggttttcccttcaccagttttcatttcagcgatgttaccttcgtgtagcgtaatcccaccaataatttgtacacggaacgggaataaccctaaaacacgtttagcaccttcacgcgcaaccgcaaaagcttctggtaaaatatcgtctaatgtttcaccatttgctaatcttgttttgaattctggggtcttagcttgcaacgcttcatcagataaattactatattcatcttcatagctttgaacttgatcggcaattttgcccattcgcgctacttcacgtttatcgctttctacccatgtttttagaaagtttgccatgtgcgtcaattctcctctagaaatacgtttgagttcttaaatagcgatttcttatatagtcaatatgattactaacaattcattttaccatttattacaatcaaataaaaccctgtcacagtaaacaatccagccaattcagtaaaaatttaaccccattatctatatggctacaaaaaaagggctgagcgcaactcatcgttgtcccagccctaacttaacgttcacttattcatcagtttcaatcaaaccgtaacgaccatcttgacgtttataaacaatgcttgtaccgtttgtttctgaatcttcgaagatgaagaactcatggcctagcatattcatttgtaagattgcttcttcactatccattggtttcaatgaaacgcgttttgttcgaacgacttgcattgattcttctggtaatgcttctgcttctggcaccgttaattccatacccttaatcccgcgttcacgtgatttacggttaatctttgttttaaatttacgaatttgtctttctaatttatcagtaactaggtcgacgctaccatacatatcaggcgatgtttcttctgctcttaatacaaggtatggtaatggaatggtgacttccaccttagcggttttatcggagtacacttttaaattaacgtgtgcagttgcggtcgctgaatcatcgaaatatttttcgagtttgctgattttcttttcaacataactccgaattgcgtcagttacctcaatattttcaccacgaacattaaaacttagcatatgaattctcccctttcacaaataccccctgtgggcacttgtcgctcggaactcaattctttcccgaggctttgttactgacttcattatatataatttgcgcgtaacacacaaataatatggtcctagtggactaaagtaattgcgtgaattggcagcgtttggtatcgcttgcggagacactgctgagcatgccataacgtgcgcccagtggtataaatatcatccaacaaaattaactgctgcaccttggaactcaacagcacgttctgcgcgcatttaaaaaattgcggcgttgctaagcgctctgcacgatttttttgtgcttgtcctttttcagttggtagcttctgcaacaatggggtcagtggaaaacagtcctcgtataagccaaccaccggattgaatccgcggctttgcaaatgtgttggatcagtcgggactgggatatacgccgtttgccgttgcacaggaaaattttctcgaatcagccgttgaaatacgtgacgtaatcgataatccccctgccccttatagcgttgaaaatactgttgcattggttcgttgtatgttaacaacgctcgattagtaaattgttcgcatggatacagttgctgccatctctggcaatccggacacaccccctgggttgtcatttgctgaccacatcccgaacaacactgcggcccaatccgttcaaactgtgccatgcaacgtgaacagatcatcgccggatagactggtcgcaatgaacaaatcaatgcaatggagggttgttcaaggataactgccgcacacattaaacagtggattgtaatcgccgtccttttcgattttgtcgtttaatttgttgacacgcacgctgaatagcgaccgtgtaatccgcgtagaaaaaataaaccggattggcagcatgctcttgctgtcgtccggctcggccagcaatctgtacaagcactgattcagtgaagaccacgtgttctgcaccaagaacaaacactgcaatatttttaaacgttacgcctcgttctagaactgtcgtcgtaatcagcacgtccccgcatcctgctctaaaggccgctatcttgtctaattgattaggatcgccagcatgtaccgtgttcactgtaatgtgtggcaatgcccgaacaacgctctgctgaaccgcctctaaatcccttacctgtggcacaaataataataagcgttgttcttgaagacacttcctgagtaagttgcgcatcacggatggtaactgatgccgtttaactgaacgccgccacgtaaacaagggatagcaatgcggttcaggtaataagtgaccatgaaagcgaattggtagctcactacccgttaaatcccctgtattaatcgcatggcgcaactttacagttggtgtcgccgtcagatagatcaatgcacagcatggcttacacgcctgtttaacagccatctcaagctggggattattgacaaatgggaacgcatcaacctcatcgacaatgacagtgtcaaatgcctgataaaacttaaataactgatgggttgtacaaacaactaacggcgtataccggtaaggcgcagtctgttccccatgcatcagcatgattggtgtgttagcaaacgctgcttgcaagcgcggatagagttctaaacaaaccgccacccgcggcgcagcaacacacacacgctgcccattagctaaagccgtcgcaatgccttgaaataacatctcagttttaccagcaccggtcactgcagttaagacatggcgttgttgcttggtaatgaccgcaacaatctgctttgcggcttgtgcttgaaaaggggttagtgtccccgaccaagttagcggttctacgatcgactcaaacagattgcattcaggcacgtaaaccaactgatccccttccactaaccgcccaaaggtcaagcaagcagcacaataataccgaccatcaggtaagcgagcttgctctttcaccacttgtccacaccgttgacataccagacgctgattaactatttgaaacgctagtcgctgtttaatctgtggtaaactataattattcataacggtactcaattgggtggcactccactgacgaccataagcaagttgttttgccatcatttcaccttccacccttagttccgttaaatccagcttattttttcaaggagtccggtatgcaaagttattttaccgttcaaaaagacggcgaatttgaactcgaaatcaaaaagtcacgcttcatctgtcatgttgcgcgtgtcacagacgaaaccgcagcacaagcgttcatcgcacaagttcgcaaagcaaatctgaaggccaatcataattgtttcgcctaccaattaggtttaacggccaatattcaaaaacaaagtgacgatggcgagccaagtggcacagccggcgtgccaatgttagaagtactgcgccagatgcagctcactaatctgtgtgtcgttgtcacccgctattttggtggcatcaaacttggtactggtggtcttattcgagcatacagtcacgccacttcggccggacttgaacacctcggtattgtccaaggtatcgaacaaaccgcttgtcagattacaattgactacgctcaatttgacactgtgcaaaatttacttagccaattaaacctcactgccgaagacatccaatatacgactaacattcaaatgaccgtctggttagcgactacagcagttagtgatttacaacaacaattaaccgaacgcctcaacggccaattacaattcgaccttggccctcaacaattcaacgaagtccccattagcgcacaggatttacaccagattcgctaccaataacgcaagaaaaggattagccaatggctaatccttttcttcattcttcggttttaataatcgttttaaaagcatcaataatgggcggcgattgtcaccaagtaacccaattgattcaacaaataattctaagccaattaagacggctaccgtcaatgccaagcttccccagagtgtcgatagtggatagagcaatgaaatcaacgagaagaccaatgccagtccataaatcacgagaaccgtttggcgatgtgataaaccaagttgcatcaaacgatggtgtaaatgatgtttatctgcttgtgaaatgggctttttattcaaaattcggcgcaacattgcgtaaattgtatccgtaattggtacaccgagaataataactggaatcaataacgtaatgaacgtcacgttttttaaacctttgagcgataagaccgcaatcataaaaccaatgaataaggccccggtatcccccaagaaaatcttcgctggatggaagttatgtggtaagaaaccgattaatgcagcgaccaaacaaaaaatcatgattgagacgctgacattggtgattgataagaagaaataggcgatgacgcccattgtgaagagtgcgataatcgaaacgccagttgctaagccatccaacccatcaatcagattaacggcgttggtaattgccagaatccaaaaaatggtgattgggaagcttaaccatcctagttcaaaggtgcctaaaaatggaattgtcaaaatattcatgcggacgcccgctaagaaataaatgaccaatgctgctaataaaataccgagcatcttttcctttggattcaattccttaatatcatcgatcatcccagtgatgatgatgatacattctgctaagaagatactgaaaagttcgtgtgtttggaattgcccgcgtaataatacgaaggtcccaaacgtaaacgcgataaaaatggccagaccacccattgccggcatcgcctttttattcactcggcgggcatttggtttatcaactgcgcctaaaacaaacgcgaggcggcgcactaatggggtaattgcggccgatacgagcatcgtcgcaaatagaccaactataattttaaacatgggttgcattcaacttgcctactttctcttgcattctctttattatacaaatcaaacccgttaaacacaacaatgacttgatttcttaagcaaaagccaagcaccctgattatctgtcccgcacaatctgggctaataaggccgtaaatcgtggatcagcattaaagggatgaatgtaatcaaattgttcgccttgattatccataaaatagtcccgattttcaacatcaatctcttcgatagcttccaaacaatccgcaacaaagcccggggttaggaccaaaatttttctaacgccttcttgggctaatgactgcatcgtagtgctagtggccggtgttagccattcattcggtccaaacttagattggtatgtggtccgaaaagtttgtttaggcaagcgcgcctgcaatagcgcagtagttgcttcacactgtgcttggtacggatccccttttgttacgtacgactttggaatcccatggtatgacaaaataatttcgtcataggtttgcgtctgtagcttctgttcaatcgccgttgccatcaagtcgatatagcctgagcgttgataaaagtccttcacaaaatgcaaagttggcatgtttgattgttttaaataaaactgcgcaactacatcataaaccgacatcgtcgtagtcgttgaatattgcggatacattggcacgaccgtcaaatcatcgattcccgccgtttgaatctcactaagcacatcggttaagaatggttgactatatgacatcgcctcaaaaacttgataatcgggtaattcagcttgtaattgagcaacttgctgttgcatgtacacttttaatggggagccaaaccgctttgggcatcgcaacgacccgctgatcagctaagaaatgttttaaaaaatggcgaatttctttgacttctggtttatctggggtccccaaattaactaataacacaccttctttcatgataatgtcctccacaattttaattaaaacggcaaattacaagtttaatccgaacaagcccggaatctttcaatggcagtctgttgatgatgtatttttaatggtcgttgattaattagttcaagtgctgctaggatctcatcagtcgttacttggctaaaattggtctttttcgggaagaaccagcgtaaccgtctattaaaatattcattggaacctcgctcccatggtgaatatggatggcaaaaataaactttgatctgataatcctgttctaaggcctgataattggcaaactctttaccatgatcaacagtaatggattttacttggggaccgaaggcccccataaacttaccaaaggcggtgtttagagccttagccgttctattaggggctttgatggcccatagaagtcgggtcttacgttctacgaatgtaaccagacatgatcgtgactcacttcgactagaaagcaccgtatctacttcccaatgaccaaaagctaaccgttgattaacagttgttggccgttgttcgatggaagtcccacttgtaaatttcccacgattttcgctcactcggtgctggcggacattccgattgggtagatcagtcaatttgaaggggagccagccacgattaagccaattataaattgacgcagtgctcaagttataagcggccgcaatggtttctggtgaccaggttaatcgtaagtgattggtaattaaagtcgctaatgctgccgtcagcatcgaacgacgaccgcaattccgccttttgcgatctgcatctcgctgagctaattctggatcataaggtttaactcggtccaactcatagctaatcgtagctttggcgacgcctaaggcgtcagccattacttggtaagatttattcccctcattgaccagttgtgctagtgcgccacgttgaaaacgtgataaagtagatgtacccaaagtaatcactccctatattggttggaattagctactaccattgtaagtgattgctttgggctttttaatttctgttcggattaattatagaatttgccaaaccaaaaaaagagcggggaacaaaattggttttgtcccccgcttcaatgttaggccaatccgcattacttcgcgtattcgaccgttcttgtttcgcgaatcacagtcaccttaatgtggccaggatactcgagttggttctcaatttgattcttcacctcacgtgctaagacggttgcttggtcatctgtgacttgttctggtttaacaatcacccgaacttcacgacccgcttgaatcgcaaaactatgatcaacacctttaaaactattcgtaatactttcaagtttttcaagacggtgaatgtagttttcaagtgattcagaacgtgcacccggccgagccgctgaaatcgcgtcagcagctgcgactaagactgagataatcgatgttgcttcagtatcaccatggtgtgaaccaattgcgttaatcaccgttgccggttccttataacgcgttgctagttcaaccccaatttcaacgtgggagccatcgacttcatggtcgagggccttaccgatatcgtgtaacaagccagctcgtttagcgagtgtcacatcttcacccaattcagcggctaaaatccccgttaacttggccacttcaattgaatgattcaagacgttttgcccgtaacttgttctgaaatgtaatcgaccaagaatcttgattaaatcaggatgcattgtgtgcacaccaacatcaaagattgcttgttcaccgatttgtctgatttgttcgtccatttccttgcgtgacttatcaaccatttcttcaatccgagctggatgaatccggccatcttgaattaacttctctaatgtcatgcgcgcaatttcgcgacgaatcggatcaaacccactaagcacaactgcttctggcgtatcatcgataatcaggtcaatcccagtcagtgtttccaatgtccggatattccgaccttcacgaccaataatccggcccttcatatcatcatttggtaacgtcacaacagttactgttgtttcagcaaccatatccgctgcactgcgttgaatagcttcagcaactaatgtacgcgcagtccgatcagcttgttctttagctgtttcttcactttctttgattaaaacagcccgttcatgttcaaggtcttgtttcgtttcatccaaaatgattttttgcgcttcatcatgcgataattcggcaatttcttgcaacttcgctttttgttgctcaactaaagtggcagcttctgcctgcttttcagttagctcttgtgcttgattcgttaaacgattttcacgttgctccaatgaacgttcttttttatccaacgttgcatctttgcgatccattgtttcttcccgttgaatcaaacggttttcttgcttttgtacctcactgcgtcgatctttcaattcattttcaatctcagaacgatagcggtgattttcatcccttgcttccaaaagaatttctttcttccgcgttgcggcttctttttcagctgctgcgattattcctgtggcagtcttatttgcaccatcaatttcacgttcgtgcgccttcttttgtagaacggaaccaactagtaaaccaacgattaacatgatgactgcgaggattaatggaaaagctaagttcattgtttcacctccgcatcatcaaaaattttgaattgcaactttcactgcaaatttttaaagatgttattatgtttagtttttcaacacatagttattttatagtttcataaaccgcctgtcaacttaaactatcggcattgcaaccgttttcgagttcagtcaatcaaatcgaccatcagaataattcggttaagcaatcaaaaaagctgaagcaaaataacttttgcctcagcttaatgattcttattcgtttgaatcgtcatccgtaaagacgtcgagttgtgtttcatcgctttcatctactgggacatccgaaataccatatgcttcccgaactttaagccggacttcatcttgaacttctggatgatcagccaagtaattcttcgcgttctcacgtccttgaccaatgcgttcatccccataggaataccatgacccactcttattaataatgtccttttcgaccgccatgtcgaccagttcacccgtttgtgagatcccttgaccatacataatgtcgacttcagccactttaaatggtggtgccaccttattcttaaccactttaatccgcgcacggttcccgatcatatcggtcccattcttgatggtttcagcacgccggacttcaagccgaacggttgaatagaatttcaatgcgcgaccaccaggtgtgacttcggggttcccgaacatcacgccgactttttcacggatttggttaatgaataacgcaatcgtctttgttttattgattgttcctgataatttccgtaaggcttgtgacatcaagcgggcttgtaacccaacatgcgcgtcacccatttcgccttcgatttcagcacgaggcactaaggctgcgactgaatcgacaactaaaatatcaacagccccacttgaaactaaggcatcggcgatttctaagccttgttccccagtatctggttgtgacaagagtaaatcgtcaatattaaccccgagggcagttgcatacttaggatccattgcattttcagcatcgatataagcagcagtcccaccttgcttttgcacttcggcaacagcatgtaaggcaacggttgttttacctgaactttcaggaccataaatttcaacgattcggccacgtggatacccacctacaccgagcgcttcatccaatgcaagggaaccagatgaaacagttgagacttgtgtatcaaccttttcacccattcgcatgattgagcccttaccaaaattcttttcaattttctttaatgcagcatctaaggctgcttgtctttcatctttagccaattaagtgccctcctcaaaagagtccttttcagtactctcttagtttaccgatttcacgaaataaaagcaagtaaaaatcgaacaaacgttctatatattttttaagctactctactatacccgaatcaccgcgtttttttcgtgctttttgggttaaaaaaactggcgtgggattccccgccagtttaagtttatttagaaaatgagtctttaaagacgcctctgttcttgatgaaataatcggtacccgaataaactgtaaagaacaagcaaacgtataacatgatctgtgccattggaatgccgatattgttaaagaagacgttgttgagtagcaatagaataatcgctaacatctgcgtcgtcgtcttaatcttacctggcatagctgcggccatcacttcgccaccttcgcttaataataaacgtaggccagtaacggctaattcacgccaaataataatcgcaaccacccatgctggcgcttgatctagcgccactaagaagataaatgctgtcatcactaataatttatcagccaatggatcagcaaacttaccgaagttggtcaccaaatgttgtgatcgggcaatcttgccgtccagtaagtccgtcaaagaggctacaatgaaaatcactgttgcaataatcgcactgactggaatacttgtcccagcgaccataatggctgtcgcaggcacatccaatactaaaatcaaagtaaaaatcggaatcaaaataatccgaaacatcgttaatttatttggtaaattcatgttgaagactccttaatgtcctttatttagccaatgttgctgtgaaattaatcgtccgcacaaacgttgcttcgttatttggactaaggttaatatcggtgccattaatcttcatcttcgttgcaggtgcattcccagtttgaatactaaattgcgtaacgccttcaggtaattcagcagtttgttcggcaccaactgcgacagaaccttgccaaatttgttggccattggccgttaagctgacccaagcagctgatttatcagctgagaacgtaatttggttggctttagctggcaagttcttaatttcaaaagcttgttgtgacccattaatgctggtcatcttcgccgttaattcttgcttcttagccttatcttcagcagctttcttgctagcttcttgtgccttactttcagaagcggctttcttactgctttcagcagacttgtcttcactactgttatccttcttaggatctggtttatccccagaaaccgtaaccgatgagcttgtttcgtttaacgtttcgcggtctttaccacggttgctgagcgcaatcccatagaccaccccaataatgatgaccacaattgccacaatcgtaatttgtgggacaaggttgcgccatttcgaccatttagaatctgttgtttcgcgcgtcaatcgggtttgattttcaacggatttttcaacatattcttctggtttcgtatctggtacagcatcttggtattctgccaacaatgcatcattatctaagcccactgtttgggcgtattgcttgataaatgcccgcacgtaaaaactgccaggcaaggcatcaaaattgccctcttcaatggcgattaaatatcgtttttggatttttgtgatttgttgtaaatcatcgagtgtgtagcccttttcaattcgtgcttcacgtaatttttgaccaatttcattcataatcaattccacccactattatcccagtatcattatccataattatagcatattggtacgtatgtgcattattaagatttctttattttaaccaaccaccattaacgtacaatgtctgtcccgtcatataatcggctgcaggtgccattaaactcaatacccaataggcaatctgtgctggggttgcaaaagcaccggccgggatctccgctacaacagcagcccgttctgctgttgtgaactgattgttcattttcgtatcaactgcgcctggtgcaaccacattaattgtgattccaagcgatgccacttcctgtgcataggcgttcacaaaggcggattgtgcgcctttaactgtactatatggcacttccattgcactgccccggccaccatagattgaaccaattaaaacgacgcgtcctaatggactttgcgctagtttcgcttgcagctgctgcatcaatagcattggtgctttaacgtgcacctgccataagtgatcgagtgccgttgcactgacctctggcaataagccatacgtcgtcgcacctgctgtataaatgaccgcatcgacttgaaaaagctggcctgtcaattttccaacagcgtcctcttgggttaaatcagcttgaagcgcaaaaaaatcctgttttgggtagtcttgcaacaattgcttttgcagcgtcgtaacccgcgtctgattttgatgatagtgtaaataaagcgaccaaccgtccgccgccatttcagtcgcaaccgtcatcccaatatcaccggatgcaccgataattaaggctgatttaggcatggtttgctccctccggtaagatgtggcagactgtcatcgtttcaattttgaaataatcggttgccatctgttgcaagtccgctaaagtcacttgttcgatcaaacctaagacatcaaatggactgatttcggtaaagaattcatcactatattggttcgcaatggcttctagcgaattgaacgcttgcaagtattcaccaattgcggctcttttaaccaacgccaagttatcctctgaaaagtcaggactttccgtggcatgttctaagatattaataatcgcatccgataattcttgggcattgtccgcatcgccaccaagggtcacaaaattaaatgaccgttgaatggcaaattcgtaaccaaaactatcatcaagtgtgccatcatcgtacaacttttgcacttgcgttgatgaatcaccaaatagcaattcaagtaacaagttcatcttcaactttgtttcaagtgctaactcacctgttccgtaatccgttaaacctttaatcccgaccatgctcttgctacgcgtaattggcatttcaagtgaccgatacggaatgatatcatgaccatcttcagcttcttcaggcaatgaacgtacaatttctgttggttgggcaaatgtttttgccgcttgattggcgttcaaccaatcaaccacttcatccggatcatcaatttgcccaacgataaagaggttcatattactaggctgatagaacgttgcatgtgcttgatagagcgcttctggtgtaatttgcgcaatactatccaccgtcccagcaatgtccgtccgcactggatgactcggatagagattgccaatcactgtatagaataagcgccaatccggttcatcattatacatctggatttcttggccaatgatgcccttttctttttcgaccgtctcagttgaaaaataaggttcttgcacaaaatcaagtagaatatccaaattttctcgcaagtgactggttgttgaaaataaataactcgttcgcgtaaaactcgtaaacgcatttgagcttgccccgtagcgaccaaacttttcaaacgcatcataatcttttttctcaaataatttatgttccagaaaatgcgcaatcccatctggcactgtcacataatccgtttccccagctgggataaacgtcttatcgattgaaccataattcgtcgttaagattgcatatgtcttatgataaccgctcttagggtatattttaacggtcaagccattctctaattcagtttcatagagggtttcacctaagcggggattttgtctaagcttcatctgtatcgacccctttcaggaagtaaatggcttgcaattgcatctttgcggcttgttcttgaaccgcttgtttagaaaccgccaagatggcctgtgtaaatcgctctgcatcaatttcagtttcaggcacaaacaaacgattaaattgttgttgccccaaataggccgcactatcgagactcgatttaaattgattaatcaaggccaacttcgtttgttcaaagaccgcctgttcaaagtcacccgcgataatccgttgacgttgggcttcgataatctctaggacgcgatctttttggcgactttcaatccccgtctgtaccgtaatgacaccccgaaaagcatcgattgcacttgaggcatagtaggctagactcgctttttcacgcacattggtaaaaagtaacgacagcggtgtgccaccgaataaggcgttcatcaccattgtggcataataatcagcttgatagaagtaagctggcatttgataggccatgtttaacttgccttgttgcaccgtttgtacttctgttttagtttgcacttgtggatataatgattgttgataaaaaatcgttggcagttcaacattacgcggtgcaaatggcaattgtgccaaatccgcgaccgttttggcttcgtcgatattaccgacaaacgtcatttggacccgatcgtttgcaatcatcgattgataatacgcatatagttcatccggtgtgatggttgctaaatcagctgcatccccataattgggaatttgttgcgtcgcatctttaaaatagagtttgcgtaattcaaccgccgcgtatgattgcttatcatcggcaacactttcgatataccgcactaagttctctttttcacggttaaaaatgaccggattgaactggccatcaaccacatctggatgcaataataattgcccgataaacgcaatcgcttgctcttgcaagtcgattgtatcccgtagatattgggggctcacaattcgcattgagatgctaaaaatcgccaagtttccttgtcgataggcattcatattaaagccggcaccatacatggcttgtaattcattcgcaattgcgacttggtcacgataggcttggctactagcacctagaacgctcgctaataatgagcgtcgggtcatcccatcagctgtgacgggcgcaattaattgaacggttaatctaattgttttaaattggttagtttgtaaaatattcaggtagacgccatccgttattttctgattcacgttatattactcctcactgtttcaacagttaaaatggctcttttcaacttatcctttttcatagcacggattctatcataccaaaaaaagaaggtgaactcaaaaaaggccgcgacatgcactaggccctgtcaagttgacaaatgaaataatataaagttgaatctgtctctatgcggcttcactccagtattcatctggggtgaggccgtttctttgtgctgagcggttgtggtgattgaaatattcgattccttcctcaaccagtcttacaagcgcttcgcaagtctttgctagtggatggcgagccatccaccgtaacttgaattcgttccaccagcgctccatcggtgcgttgtcgtatggtgttcctggtcgagacatactacgtgtgacgttgtaacgaccaagaaagttgttgaaggcaccagaggtgtaggctgatcctcgatcagtgtgaaccaatgggtggacgtcgccagaagcctcaaaggctcgttggaaaacctcgatttctgctgctgacgtttcagtagtgctcaaattgtaggacaataaacgtcggccgtagagatcaaggacgccactcaagcgcaccttatacttattatttacgccgtaagtcagttccgttgaatcggacaaccagacctgattaggactgtcgacgtcgaagttctgattgagcacattgtcttgaatgtgctgttcgttctccttatgtcgactgtgcttcttgacccgaatttgacatgtcaagctgagctcccgcatcacacgacgtaccatcctgaaagtaacggggaagtcaattaggtcatcatgttgaagattcaataaaaggttcccagcaccgataccttgatgatgaaaatcaaaccagtattgtgtccgttccttgagctgacgattacgggcttcccaagctgtttcttctcgatttaaccctttgtagtaagcctgccggcttacaccgacaacggccaacagcgtagatattgcaccacgcttgccttgactgacctcattaattgcgaagtaagacagtcgatgttgtttactcaccccctgcgctggatttccagcaatttttttgcgaatgcctccacaagctctttgtctgcgagctgtgctttgagctgcctgatttcaagattggctttatcgagttcagtcagctcagcttgttctttgtgatggccacggttgtccacgagcgcctcatagccgccgtgattggccttgattacccatgaacgtgcttgttgataagagacttggaagcgttcagcggcctctgtgtatgaatgattcagcttggtgacatactcgacaatttcaatgcgttcttccaaggttgttttacggctcatagtgggaacctgctttctggacggcgacgccgtcaaaggtttattcccattatacttgtttacccagtctacgacttgctgcgatccacgaagtccaaacttatttgcaagttcatcaaaggtgccttcgcctataagatatgcgtggactactttgagcttgagtttcttcgaatagtgtttgtttttcttagcctcctttagaccattaattccatcacgggagtatcgatctcgccaacgctctagcgtcttatgattaatgccatggcgattggccaccggacccagtccaatttttgattgggtcagttcatctaagattgttaatttctcgagtaccgtatgtttagatctgggcatacaaaaatccctccatagtcgtcagatgaattattgtatttcatctgacaaccataaagggattatcgcaacaaaagtattttttgtcgcggcctttttcatttaatagtttaaccgagttccatcaaccagcgcctttcagttaatcctgaatgtcaatcaatcgctgacgcgcttattcgccattttaggcgatatttgacttatgtcacacgctattgttctgttggttcttctggtacgttttgtaataataccttgcgtggcttactaccttctgatggtccaatcacaccacggctttccatctcatcaaccaagcgtgcagcccggttatagccgactctaaaacggcgttggagcattgatacgctagcggtttgctgtttaacgaccaattcgactgcctcttggtaatattcatcttctggttcttcagttgattgcttttcctgctcagtggttggaatcatttcttcgtcgtattcagccgtttgttgtgctttaataaacgacacgatactttcgacatcctgactcgaaatgaaggcgccttgcacccgtaatggtttgctcatcccgattggcatgtaaagcatatcaccacggccaagcagtttttccgcgccactgccatctaagatggtccgtgaatcaatcccactggatacagcaaacgcaatcctcgatggaatattggccttaatcaacccagtaataacatcgacagatgggcgttgggtagcgacaatcatgtgaatccccgccgcccgagccatttgtgccaaacgaataatcgcactttcgacttcgttgctggcaaccatcatcaaatcagataattcgtccacgatgacaacgatataaggcagtggtgcgcctttaatttcgccgtcttcgttgtggccttgaatatactgattatattcaatcatattccgctgacctgtatcggcaaataattgataacgtcgttccatttcttttacaaccttgttcaaggcgttcgcagcctttttggcattcgtcacgacaggaatcaatagatggggcaccccattatagacgtttaattcgaccatcttcggatcgattaacatcaatttaacttcgtgtggtttggcactcattaaaatacttgtgataatcccgttaattgcaacggacttcccactcccggttgaaccggcgattaataaatgcggcatcttggctaaatccgacataatgaccttacccgaaatatctttacctaacggcacagcgagtggtttgcctggatgtgggggttcttgttcaatcatttctctaaaggaaacggtcgaaacggtcgtgttcggcacttcaatcccgacatacggtttacctggaattggtgcttcaatccgaatatccttcgccgctaatgcaagcgccaaatcatccgctaagttaacaattttagagaccttcaccccaactgccggttgaatctcgtacttcgttacggctggtcccagactagcactcttaaccgtcacatcaacaccaaacgaatcaaatgtttgtttcaagacctgttgatttttctcgatagctttatattccgcactctgatcagacgccggaatttgcgttaataatgctggtattggtaattcgtaatcatcatccgtctcgttcagtggtgcgagttctgccacatctggaacatgctcatcttcgtcagccaccggttcgggtgtagttggttctgcttgcgttgcaattggttttggtagatccttgggaccgtttattttaaaaggttccaatttttgcttcggtgcattttctggaccatccgttgcgaccatttgctctttagtctctgacgtctcttctgcttgttcagttgcattttgaacagctttttgcgtctgttcttttaaagcactgacttgcgctttacctttttcagagaccttttggaaccctgatttcgtgtagccgccaactttaaagagcccatgcacaaaccgttgtgtactctgaacaacgacgctgaatggaatatctaagaaaacaaaaacgccgataatcacaatcaagacggctatcagataagtccccatctgcgcgaacaagaagtgaaaaacaccatacaacgcggcgccaattaagcccccaccaacttccgtcgtaacggccatcttctggaagtcttccaataaaagctgccatgtggcggccaagaaatggttattgaccgcttgatggtgcaagacgaatgctgacaaccaaattaaaatcccgagatacgcgattgcaaatccaagcgtcttttggtgccataagggtggctgcttgccataaatcaacaaatagacccccaaaagggcgaataaaatagcactaataatgaacgtatcgccaacaaacagacggaatacgttagcgcaaagcgcgccgataaagcccagctttaaacccgcaaataaactaattaaaataaaaataaacccgatgatgttaactgtgaaatcagtttgttgttttttctttttgcgtgctgctggttttctttttttgcttttagtggccatgaaaatctccttcaaccttaaatcctactatccattatacacgaacatccgtactactaaacccataaatgtcagtcccgtaccgtttttaatcatggtactaaaaaaggccacggcaaaattgccgcaacctttcgctgattagtcttcgttggcttgcgctgtaaattggagttgaacgccccgatttaaagcaaccgccgtcacttgatacgtcaatgtttcgatgtattcaatcaatggtcgtgaaagcttcatcatgtctttttgatcaatttcacttggttcaccaaagaaatctaagagttgaaccacttgtgaaatttgacctgacactgcaaagccactcttttctggtgcaacttggaaaggcgtcacaatttggtaaatattccccgcgctcaaatcagcttcttgtaaatatggatcttcttcgctgatggtgactaagctgacttggatattttgttgtggttctacatcaggtgaaacacggtcataatgaaaagcatcaacagtaattggatctttcttcgtttgcatcaaaaacactccctattttaatttatcattgtcgtacaaatgactcttttcgagtcctggaaaatcttgttggcgcaatgcctcaaagatcactaatgccgcacagttcgagaggtttaatgctcgaatatggtcggacattgggattcgtaaacaccgatcttcattttcacgcatgaaagtttcaggtaatccggtcgtttccttaccaaacataaaataatgatcaacacttgtatccgacacatcttgatcagaataagcttgcttagcaaacttcgtaatcaagtataaatattgacgatcgggcacagttgctaaaaaggcatccaagttcttgtgataattaatcttaacttggtcccagtaatcaagaccagcccgttttaaatgtttatcatcggtttcaaagcctaatggttcgattaaatctaaaacagtatctgttcctgcacatgtccgcgcaatattaccggtattggcaggaatcagtggttcgtataatacaatatgattagtcacggtctaaacttccttaaaaaagattcagtagattaattatacaatagaattcacaaaagctctaccttgctttgcaaataaaaaaacgtagtccctcggttattcacggcgagaaactacgttagtgtcatttcatcactagcttttatcaaaataagttctgataaaagttagggaaaaaattccttaaaaacattatagcgcccttattttagagttgcaatcagatttttaaactttctttaaattctcatcattttcccactaaaatcgtgacatctaatgaaatttcaggtagcgcttctaacgtgattgccgctaattgtgccttagaagccgtccacgtcaatggcgtcatttcgaccaaatcgcgcaatgtctcgggtgttaacgtcattgttttttgaacttgcatttcttgataatctggaaaatgttgcgcaaacaattctaagaccggaccatgatcatagctttccttagcttgaccatgatacagtaactcccgtaactcatgtaagtaacccgcattgggaatcaccttaattagttgaccgcccggtttcaagacacgtttaaattcttgatattgcgaaggcgaaaagatattgagcaccgtatctaactggtgatcagcaaatggcatccgcgctaagtctgctgcacaaaaccacgcatcggcattgtaatcacttgccaattgaatcgcaggtttagaaatatcaaacccgatataacgcgcggaaacttgcgcattgagctgttgcactggcgttccttcaccacaaccgacatcaaggactaaactatcgggggtaatccgtgatgcaatttcttttaagaacggctgaaagaaccctgcttgtaaaaaagcccggcgatgttgcaacatttccttggtatattcagacttcatttgctttgctaaaaaatataacgtgccatttttagcgaggtcaaaactatgcccattgacacaaagtaattggtgctcggctacacttgcaaatacgtcctgacagattggacattgtaatacggccaagttcgtcgttaaaaactgcttggctaactcaatttttttcaaatttctgattctccttgatttaacgtgctttcaaaagcatcctgttccggttagctacattagccaaacaatcggctacgccgcttattcgtctaattaggctaatcctcacaggataaccgcttttgacgcacttcttttcttaacgtactttcaaaccatccttttgcggttaactacgtccagcaaacgatcgacgctgtcgctcattcacgagactaggttaatcctcaaaggatacccggtttgaacgcacttcttttataccgcactttacattcttaaaatatccagtagacttaacagtaagttattgatgaaggaagtgacaccatgctcgaaacctatcgcttcgacagtgctaagaaaaagctcaccaaacatgctaaaatccagtccaacagttggattaacgtaactgatccctcgactgaagaaattgagcttctcactaagaagctccacatcccatctgattttatctactatagtttagatgctgatgaaagtgcgcgtgctgagcacgatcctgattataatgcgaccctgattattttcaacataccaattcttgaaaaagacccgcaaaaaccagataaatacctctataaaacaagtcccttaggaattattgtaacagattcgaccgtcttaaccatcaacaaaacgccagtcacctttttacagagctttgttgatggccaaattaaaggtttcaatccacaaaatcaccgtagaagtgtcctccagattctcttccgcatttcatccatctatctccaatatttgcgggacatcaaccgctctcgtgaacaaatcgaaactcgcttgcagagttccctacagaatgaagaactcttcgatctgatgaccattcaacgcggcttagtttatttcatgatgtccttaaagaccgataaaatggtactcgctagtttaatgcggaccaatatgttagatcttaatgaagatgaaattgaattgcttgatgatattcagattgaaaatcaacaagccatcgaaatggcagaaatttccaacacaattattaacgaaacagccgatacttactcgtcaattattaataataacatgaatagtgttatgaagttcttggcatcttattcaattattctcaccatccccggattagtatttagtttttacgggatgaacgtggaccttccactgtctcgctccaaaacaagttggttgattactttattcatttccctgatcatttctggtgtgctagtctatcgcttctggcgcaagcggtacattaaatagagcgtgtgccagctcctgcggattagaacccgtttaacttacaaaaggccactatcatcaaacacattctcccattctttgggttcgaatgtgttttttatttgactttcataaaaaagctcgttattatacgttatgcacggataaattccgtgttatcaaaaataaatgttcgtttttaaggagaattcccaatggacgtatttgattacgaagatgttcaactgattcccaataaatgtattgtgaaaagtcggagcgagattgatactagcgtccgctttggctcagaaacgtttaaaatcccagtcgtccctgctaacatgcagacgattattgatgaaccgcttgccacctggcttgccgaaaaccattacttctacgtcatgcatcgatttcagcctgaaaagcgtcccgcattcatcaagatgatgcacgagcgcggcttatttgcctcaatcagtgtcggggttaaagacgatgaattcgactttattaatcaactcgcaaccgataacttactaccagaatacattacaatcgatatcgcccacggccactcacaagtcgtgatcgatatgattcaacatatcaaaaaagtactgcctaagagtttcgtcattgccggcaatgttggtacccctgaagccgttcgcgatttggaacgcgcaggtgcagacgcaaccaaagtcgggattggccctggtaaagtttgcatcaccaaaatcaagaccggctttgggactggtggttggcaactggcggccctcagatggtgcgcgaaagctgctaccaaaccgatgattgccgatgggggaattcgaaccaacggtgacatcgctaaatcaatccgttttggcgctagcatggtgatgattgggtccctctttgcagggcacgctgaatcatctggcaaattagtcgaagaagatggtcaacaattcaaagaatatttcgggtcagcttcagaattccaaaaaggcacacaccaaaacgtcgagggtaaacgcattttagtgccttataaaggtgcgattagtgacacgctcaccgaaatgcgccaagacttacaatcatcgatttcttatgctggtggtaaacgcttatcatcattgaagaaagtcgattacgttcttgttcgccattcaatttttaatggtgacatgctttaaaaagcagttaaaagagccagactaccttttaaatcggtagtttggctctttttagttaggtacctaaaaacttctctgaaatggttgaatccgacttgaaacaactgtataattacccgtgtcgcttttaaccttagcgtctacattgatcagaaaagggtgtgaaacaaatggatattaaacatacacttggagataacagtgttatctttcgtgatgcaacatacattagaagaacggtgtttgtccgagaacaaaatatgccggaaacacaggaaattgatgcgcacgaagatcacacgattcactatgtaggttacctcaatcaagacccagcagtaaccgcacgcgtgcacgtcttaaaagacggtggatttagaattcagcgcgttgctaccatcaaagctttccgtggccaaggactcggctatcaattaatcgaagccatcattgaagacgctaaacgcgccacaacgccttatattattttattcgcacaggaccacgccattggtttctacgaaaaattaggctttattgtcaccagcgaaggcgaaatggaagcgggcatcccccaccactacatgaaattaacgctctaaaaacccaaaaacgcacgatccgcattcattacggatcgtgcgttttttattgctcgtataagcctgaaactgacttgaaccattcaaaaaggtgactaattaatatcttgatgatcgcatatactggaataccgagaatcacaccggcaaggccgaataactttcctgaagccagcaacacaatgattgtcgtgaccggatacattgccatcttgctccccaagaccaatggggaaactaaacgaccttccaaggtctgttcaacagcaaacacgatgagtactttaatcaataataacggcgagataaacgctgcaataatcactgacggaaccatcgctaggaaagagcctaaatacggaattaagtttaaaatccccgctaaaattcccaacgtcaacccgtacttcatcccaacaatccagtagcctacagtaaacatgactgcaacccaaaacgctactgtcaattggccgcggatgtactgactgacctgtgtgttaatttcttccaacactttcccagttgtggcgcgtactttaaccgggaagaattttaacaaatagcctttcattcggtgaccatcttttaacatgaagaataaaatgaacggcatcgttacaatcgcgatgactacgttcgtcaccactccgaccgctgttccaatatgactaacggtcgaagtcagcattttatttactttacttgataaattactaaacacatccgtattgatatcgtttaattgtttttgaatcgatttgaaggctgggtcgttaaaccatttcatcgtctgagtttgaatattcgcccaataagacggccactgatcaattaaactcgttgtctgggattgaatgattggaataatcgtcgcaattccccagaccagtaagccaacaattaaaataaaaataatcgtaatcgacaatacccgatttaaatgccaacgccgttcaaaccaatcaattaacgggttggtcaagtaatacaagacggccgcaataataatcggtaacccgataatcaacatcaacgactgaattggttttaacagccaagcaagttttgttaataaaagtataatcagcaacgttaataacatgtttaacaaaacaatcggtagcttcttatttaaaaaccatttaaagaaccatgaacgttctgtttgtggctgtttattctctgtcacaccaattcacctaattcctacatagtttcttgatacgttatctgcgttcctactttgaattcaggaacagccggaacacccgcggcggctggtgttaaataaagcccactttgcagttgatcttcttgtggcgcaggtccaaaaactaaagcgacatgaccaatactgttgaggttaggatttaccaacgcgcccacatacgtaatcgtataaggttgttgattaataataaccgtagaatctgtcgtcagtgttagctgttttttggccgcttcgtccataaaatgttgaatcaatgccacgttttgaatggcagttgtcgcatgttcatcgaataaaatgaccatcggttcttgatcatcaatggcgtcgttgccaattgaaatgacttctgcttgcgtgttcataatgaaatctcctcttagttaagatagtatcattgtagcatattcgcgacttagttttagcgactagtgaatccttttagtaacaaattaaaccgttttcgcaggaatatgctatactcaaagagtatttgacgaagggagtctgattatgacagaagaagttttaattggtggttatacccgccggattggtaaagggatctaccgcggaattttcgatgcaacaactgcaaccgtgagtgacatccaaccattcattaatctcgataacgcatcctatttaacgatttcaaaccgtaacatcctctacaccgtcattaaagatggggaccaaggtgggattgctgcctatgacttagctagtggcacccctgtctttttgaacgcggtcttagcagccggcgcaccaccagcatacgtggcagtcgatgaagaccgccaactcgtttatgcagccaattaccataaaggcgaaatactcgtttatcaaatccaagccgatggcagtttaaccttagcgagcacgacagttcatgaaggccacggtccgcgtcctgaacaagctagcgcccacgtacattataccgacctaacacctgaccaccgcttagtggtctgtgatttgggcaccgatgaattagtaacttatgccgtcgacaatgctggtcaattaaccaaagtagcaatttacaagagtgaacctggttttggcacacggcatttagtcttccatcccaatcacaagacagcttacctattgggtgaattgtccagtgaagtgacggtcttagattatcatgcagccgatgggacttttagcgcggttgctacctactcaatgttacctgcagattggcacgaagcaaacggcggcgctgcaatccgtgtttccaaagacggtcgtttcctttatgcttccaaccgtgggtataattcaatcgttgtgtatgccatcagtgatgacagtcgccaactacgagcaatccaacaaatgtcaacggatggtgaattcccccgtgacttcaatctttccgctaacgacgattttctattagccgttaaccaaaatagtgataatggtacgctttatcggcgcgatgcccaaactggtttattaaccgcctgtcaaaaagacttagaaacacctgaaggcgtctgtgtcttattccattaaaataaaaaagattgaccgtattggtcaatcttttttatttacttcttttacgatccattaaattaataataattgcaatggcaattaacacaattgacgcaaaataaatgaagtgtaaaccattgtatagaatatggcgtaatgttggtaataattgtttaggtaagttcaaagcagtttctggattaatcaattcatttaacatgttttgatctaatcgaccatcaccagcaatcccttttgccaattgccgattcaaaataatcccataaactgaaaccatcaaggtttgacctaaagttcgacttaacgtattaaacgacgttgcaacaccaactttgtcagcaccagcaacgctttgtgccgtaacagtcgtcgtggtaatgattaagccaaagccaatccctaaaccagcagcaactaataagaagaaccaaaacggtgtggtttgtgggaccaatgctaagatgaagctcccaacaagtaaaatacacaaactaccggctagaattgttcgtggtgcgtgcttaacaagtaataggcctgcccataatgaggcaaaaatccacatcacagaactaggcgtcacaacaaagccccccatcgaggctttcaatccgaggatcccttgcatccacattggcatatagacttcaaaaccaattaagaaaccactcactaaagcagccactgcattttggacaacaaatgttcgatttttaaataatgataatgagataatcggatcttgtgcatgtttttcaacgcggataaagaggtaaaaagcaaccactgcaatcacgagcattgaccctaaaacgagcactgacggtttggcttcacccatgacttggaagccatatagtaaactcaaaagggccgccatcaaccataaactgccccaatagtcgactggttcagcactcgtcttcttctcttcttgaaggaagtaccagattaaaccaatcgtaataatcccaatcggtacattgatgaagaaaatccaatgccaggtcaacttatcaacaatgaagccccctaaaagcggcgcaatgatggaggcaatcccccatgctgacccattaaaacccaagactttcgcccgtttttcaatcggataaatatcagcaataatcgtaaatgataccggcataatcgccccggctcccaagccttgaattgcccgggaaataattaacgtccccatatgatttgacaatccacataaggatgatccgatgacaaacaaggccaaaccaaagatgaagattggtttacgcccaatccgatctgccatcttaccatagattggcgtcatcatcgcattcgttaataggtagattgaaaagacccagttcatcaatttcataccgtgtaaattactaatgatggttggcattgccgttgaaacaatcgtcccttcaatggctgtcatgaaagttgcgacgaaaatcgcaatcgtcacgagtaatacattcgtttttcttcccttactttgttccattcttagctccctctcttattcttgggcataaaaagagccttttcttaactcaaataagctaaggaaaggccgcctcttttactcgtctaataatacattaggcatttagtttagcaatacttgcctttaaggcatccactttatctaaacgttcccatggaaattcgacatctgtacgcccaaagtgcccatatgcagctgtttgcttgtatataggtctttgtagatctaacatttgaataatccctgctggtcgtaaatcaaagttttcacgaattgcagtttgaatcttttcttcactgacggtccctgtttcgaaagtatttattgaaacagaaacgggttgcgctacaccaatcgcataggccaattgcacttcacacttgcgcgctaacccagccgctacaatgtttttagcaatgtaacgggctgcataacttgctgaacggtcaaccttagtagcatctttccctgagaaagcaccaccaccatgacgtgcataaccgccgtaagtatcaacaatgatcttacgaccagttaaacctgaatcgccttgtggtccaccgatgacaaaccgaccagttggattaatgaaatacttggtttgatcatccaagtatttggctggaataacggtttgaatcgcttgttcaagcatatccttttgaatggtttctaaagtcacatctgcatcgtgttgggtactgataacgacggtatcgacacgaacaggttgttcgttttcgtcgtattcaacagtgacttgcgccttagcatctggtcttagataagcgagttgcccgctctttcttaactcagcgactttgcgcattaaacggtgtgaaagggcaattggtaacggcattagttctggtgtctgatcgacagcaaacccaaacattaacccttgatcccccgcaccaatcttatcaagtggatcttcatcctttgcacgagattcaactgaatcgtcgaccccttgtgcaatatcaggtgattgttcatcaagtgcaacaatcacagcacagttatcgccatcaaagccataatgcccatcacgataaccaatccctttaatagtctctctgaccactttttggatatcaacgtatgccgttgttgaaatttcgccgacaactaggactaacccagttgtaacggttgtttcacaagcaactcgtgcttgtggatcttgtgctaacatcgcatctaagatggcatcactaatttgatccgcaatcttatctggatggccttcagaaacggattccgaagtaaataaatgtctttcttgcatttctatgtttccccctatatatgtgtcggttacaaggcctcttcacggtgtgtgaatcctatcgggaacttcttataactctactatcctagcacaaaatacaatccatttcaaaagccgttgaccttcttttcaaaaaaagttaagatgagacacatattctaagaaagaagtgttgctattgttctaccttaaccaacaacatctaaaggcttcaactcggccacaattactgactttgtttaattatttaaatctcagtttaatcgtcggactgacaatgtggtcttttccaaagcaattcgggctttcattttatctaactgcgattctaggggcgctattagccattttactcgtcttatcaccccggtataaaccaaagcgaataattgcaactgctgcccttttagtcgcaattattctagccgcaatcatcggctggcgtgatctacctttgattgggcttctatcagggattactagcatttttgttctaatcccttttatctacccagaccagttcaaagaccgtacgttacggttatcatttcaattcttactagccccatttttctttttaattactcagattttcagtggcattcactttatccccgaggatttactcgtaaaattaggcctattcttaatcatcatttatcttctcgaactaacgactcacaatcggatgattactatcctcagttatgtagtatgggcgtgcattattattgcagtgattttaacgcatttaattcacggttggcatttaattctctttgcaggtggccagttattattaattgcgttacaactcggcctaatcaaacgtaactgctatttacaagagtttggatacttgctattaatcactggcgtctttaattaaaatgattaaacaacaaaaaagcgtaagcaatttactgcttacgctttttttaagacggtcacaacgggactcgaacccgtgatctcctgcgtgacaggcaggcgtcctaaccagctagaccatgcgaccgaatggaggttacagggctcgaacctgtgaccctctgcttgtaaggcagacgctctcccaactgagctaaacctccaaaaaaatgacccgtacgggatttgaacccatgataccgccgtgaaagggcggtgtcttaaccacttgaccaacgggccatgtcatttattatttaacggagagtgagggattcgaaccctcgaaacaggttagacccatttacatgatttccaatcatgctccttcggccgctcggacaactctccaaataattgactccggttgtcaggctcgaactgacgacatcatgattaacagtcatgcgctctaccaactgagctaaaccggaatgaaaaagcgcggcaacgtcctatcctcgcaggtagtttcccaccaactactatcggcgctaagaagcttaacttctgtgttcgacatgggaacaggtgtatccttcttgctatcgccaccacactattttgtgcttgcgcactgagaagaacttcgttctctcaaaactgcataataagtaatatttcatttcaaaagcctaacattgcacctttggttaagtcctcgaccgattagtactagtccgctccatacatcgctgtacttccactcctagcctatctacctgatcatctttcaggggtcttacttccataaaggaatgggaaatctcatctcgaggggggcttcacacttagatgctttcagcgtttatcccgtccatacatagctacccagcgatgcgcctggcggcacaactggtacaccagaggtatgtccatcccggtcctctcgtactaaggacagctcctctcaaatttcctgcgcccgcgacggatagggaccgaactgtctcacgacgttctgaacccagctcgcgtaccgctttaatgggcgaacagcccaacccttgggaccgactacagccccaggatgcgatgagccgacatcgaggtgccaaacctccccgtcgatgtggactcttgggggagataagcctgttatccccagggtagcttttatccgttgagcgatggcccttccatacggaaccaccggatcactaagtccgactttcgtccctgctcgatttgtcaatctcacagtcaagctctcttatacctttacactctacgaatgatttccaaccattctgagagaacctttgagcgcctccgttacactttaggaggcgaccgccccagtcaaactgcccacctgacactgtctcccgccacgctaagtggcgcgggttagagtggtcatacagttagggtagtatcccaccaacgcctccatcgaaactagcgttccgatttctacggctcctacctatcctgtacaaactgtacaaacactcaatatcaagctacagtaaagctccatggggtctttccgtcctgtcgcgggtaacccgcatcttcacgggtattataatttcaccgagtctctcgttgagacagtgcccaaatcattacgcctttcgtgcgggtcggaacttacccgacaaggaatttcgctaccttaggaccgttatagttacggccgccgtttactggggcttcaattctgggcttcgcttacgctaactcatcctcttaaccttccagcaccgggcaggcgtcagcccctatacgtcatctttcgattttgcagagacctgtgtttttgataaacagttgtttgggcctattcactgcggctgacctgacggtcagcaccccttctcccgaagttacggggtcattttgccgagttccttaacgagagttcactcgctcaccttaggatattctcctcgaccacctgtgtcggtttacggtacgggtagtttatttctcactagaagcttttcttggcagtgtaacatcaggaacttcgctacttaatttcgctccccatcacaacttgtccttaaagaatcaagcatttcactcaactcaagacttgttgcttagacacacatttccagtcgtgtgcattccttagcttcctgcgtccctccatcgttcaaacaaaataaactagtacaggaatctcaacctgttggccatcgactacgcctttcggcctcgccttaggtcccgactaaccctgggaggacgagccttccccaggaaaccttagtcatacggtggatcagattctcactgatctttcgctactcatgccggcattctcacttctaagcgctccactagtccttacgatctagcttcatcgcccttagaacgctctcctaccgcggacacttacgtgtccacccacagtttcggtattatgtttagccccggtacattttcggcgcagcggcactcgactagtgagctattacgcactctttaaatggtggctgcttctgagccaacatcctagttgtctgtgcaccgccacatccttttccacttaacataaattttgggaccttaactggtgatctgggctgtttccctttcgactacggatcttatcactcgcagtctgactcccggaactaaatcaatggtattcggagtttatctgaattcagtaacccatgacgggcccctagtccaaacagtgctctacctccatgatccaatattccgaggctagccctaaagctatttcggagagaaccagctatctccaagttcgattggaatttcaccgctacccacacctcatccccgccattttcaactgacgtgggttcggtcctccagtgtgttttaccacaccttcaacctggacatgggtaggtcacttggtttcgggtctacatctatatactcactcgcccatttcagactcgctttcgctacggctccagcttttcactttaacctcgcatataaacgtaactcgccggttcattctacaaaaggcacgccatcactcattaacgagctttgactaattgtaggcacacggtttcaggatctatttcactccccttccggggtgcttttcacctttccctcacggtactggttcactatcggtcactagggagtatttagccttgggagatggtcctcccggattccgacggaatttcacgtgttccgccgtactcaggatccagaacggaggttaagttgtttaatctacgtggttatcacactctttgactcagcttcccagctgattcgattacaacttaacttggtaactccaatgttctgtcctacaaccccaagaagcaagcttcttggtttgggctcttccccgttcgctcgccgctacttagggaatcgatttttctttctcttcctgcaggtacttagatgtttcagttccccgcgtctaccttcattaagctatgtattcacttaatgataatacccgactaaaggtattgggttcccccattcggaaatctccggatcaaagcttacttacagctccccgaagcatatcggtgttagtaccgtccttcatcggctcctagtgccaaggcatccaccgtgcgccctttataacttaacctaactttacctacggtaaagggttattatttgagtttagcgatatgaactaattcatatttctattaaaaaactctttaaaacgcaatgttttctcggcttttaaaactaatatattacttattatccagttttcaaagaacaaagtttgagagtagacctctcaaaactaaacaaagtttcgacttcgcaaatgtacaaggttttccgtattattccttagaaaggaggtgatccagccgcaggttctcctacggctaccttgttacgacttcaccctaatcatctgtcccaccttagacggctggctcccgaaggttacctcaccggctttgggtgttacaaactctcatggtgtgacgggcggtgtgtacaaggcccgggaacgtattcaccgcggcatgctgatccgcgattactagcgattccggcttcatgtaggcgagttgcagcctacaatccgaactgagaatggttttaagagattagctaaacctcgcggtctcgcgactcgttgtaccatccattgtagcacgtgtgtagcccaggtcataaggggcatgatgatttgacgtcgtccccaccttcctccggtttgtcaccggcagtctcactagagtgcccaactaaatgctggcaactagtaataagggttgcgctcgttgcgggacttaacccaacatctcacgacacgagctgacgacaaccatgcaccacctgtcactttgtccccgaagggaaagctctatctctagagtggtcaaaggatgtcaagacctggtaaggttcttcgcgttgcttcgaattaaaccacatgctccaccgcttgtgcgggcccccgtcaattcctttgagtttcaaccttgcggtcgtactccccaggcggagtgcttaatgcgttagctgcggcactgaagggcggaaaccctccaacacctagcactcatcgtttacggcatggactaccagggtatctaatcctgtttgctacccatgctttcgagcctcagcgtcagttacagaccagacagccgccttcgccactggtgttcttccatatatctacgcatttcaccgctacacatggagttccactgtcctcttctgcactcaagtttcccagtttccgatgcacttcttcggttgagccgaaggctttcacatcagacttaagaaaccgcctgcgctcgctttacgcccaataaatccggacaacgcttgccacctacgtattaccgcggctgctggcacgtagttagccgtggctttctggttggataccgtcactacctgatcagttactatcaaatacgttcttctccaacaacagagttttacgatccgaaaaccttcttcactcacgcggcgttgctccatcagactttcgtccattgtggaagattccctactgctgcctcccgtaggagtctgggccgtgtctcagtcccagtgtggccgattaccctctcaggtcggctatgcatcacggtcttggtgagcctttacctcaccaactaactaatgcaccgcgggtccatcctaaagtgatagccgaaaccatctttcaaccttgcaccatgcggtgctaggttttatgcggtattagcatctgtttccaaatgttatcccccactttagggcaggttacccacgtgttactcacccgtccgccactcactcaaatgttatcaatcagaagcaagcttcttcaatctaacgagagtgcgttcgacttgcatgtattaggcacgccgccagcgttcgtcctgagccaggatcaaactctcgattaaaagtttgtagctcttgttttgttacttaatttatttgctagcgaaattgactttgcaaatatgttttgtgccccgaagggcgaccctacacatttggtttgtcgaaactttgttcagttttcaaagatctactgtgttgaaacagcttaattaatatatcatttctaacgaacactgtcaagcgatttttataaatattttctgaatatttattcaatctcgtttgacccgttatttcgttagcgatgagcttttctctcgctgacaacatagaatactataccaacatctaaatctatcgtcaagtaaaatttgcataaaattcatcttttttttaaatattcaaacaacttagttatttgcaagctttgcttggcattctggacagataccatgcacttccattcggtgcccagttaccataaaccccgttagattctcagcaatcacttctacatcatctaactccggataaaaaacatcaactacttttccacagttctcacaaatagcgtgataatgcttggtctgcgcaaaatcaaaatgactggatgcatctccataagccatttcttcaataatccctaatgaggtaaacagacgcaagttattatagattgtcgcaacactcatattcggaaagcgccctgctagcgccttatagacatcgtctgcagtcggatgcatatgagtgccaatcatgaattccaaaacagcttgccgctgtggcgtgatccgtacgttgtgttctttgagtttccgtaacgtttgttgcacgatgtgactcattttaccaccacctttcgctaatgataatcattatcatatatccttattgctgtaatcgtacctttttttgacgagactgacaagtatctttgctcaaaaaaagacgttacgcgagtcccgtaacgtctttacatactttacttcaattcaggtgcatccgtttcataaaggtccattgttgacttaccattattttgctggataacactcgttttattgttactgtctttcaacttagctttagcatctttcaccttgtagctaatcttagacttatctggtttttcgaatccttgtggtgtatagaatcgaagtagatcgccggtgattaccttgtcagaaagtgacaattcttccgttacatgttcactgattgccgttaattgcttcttctgcgctgccgttaaattcgtcagcgtcttcccattagtcgtatcgtaataggtgctgcctaccttcgtatactgtggtgtgacaaagtccccatttctaaagacaaccgtctgattgcggttaggcgcaagtaaatccgaaccaaattggatggtatcgtcattttttacacctaataggttcaataaggttggtaaaacgtcaatttcaccaccataggtatggttaacgccaccttttaacccatccatatgcaccatgaacggtactttttggaattgcgcattatcaaaatcagtaaatttatcctgattcaataacttcgcaacagccttcttatggttccctgaaatcccataatgatcgccatatagaacgagcatactattcttatctaagccagtcttttgtaaccaagctaagaattcaccaattgattgatccaaatacttagcggtttgcacataaccatcaactgtatcatcaccagtatcggtcttagcaattgattgattttgtttatccaataagtatggatagtgatttgtcacggtgattaatttagcatagaacggttgtggtaattgttcaatgtattgggctgagtcttgcatgaagatcttatctttcaagccataacccacgttgtagcctttaccttctttaaagtattgagaactgaagaagtaatcatagccccatgacttgtaggtattatcccgattccagaaacttggcacatccccatggaatgaagcggttgtgtaaccttgttgatctagaattgatggtgctgcttggaaggtattggttgtcccttgagtgaccatggcggccccttcaggtaacccgaacaatgagttttcgagcattaattcagcatcagccgtcttaccttgaccaacttggttaaagaaattgtcgaaactgagggtgttttggtcgtgatatagcttattgatatttggtgtgacttcttgaccgtcccacttataatcaattaaaaattgttggaaactctctaaatggataacaaagacgttcttacccttagccacgccagtgtattcaacattgggtgcaacccggttgtccttcatatacttcaagacactgctcatactactactatcagcattagccttaatcgcattattcttggtcgtcttcacgccatcatagacagtgtatgcattcatcccaagatacttaatgatgtagttgttatcgaacgtccgggttaataacccagaacgatctgcttctgcaatcccgaggttggcaccgaataacacaacagctaacccagtaattgcaaatgcattccgcttcataaagacacggtgatcaatcttcactaacttagtagccaataagatgattagcaataaaacatcagcgaaaactaggaaatcagaatattcaataatcccagcaatactcttgcccaagttatttgataccgcaccagagcccttcattaagttaaacgttaagaagtctgaaaattcacggtaatacaaaatattcgagaataaccaagttgaggttattaaatcaataataatcaacgtaatgtatgacttgcggccattcataaacaaggcaatcccaaatagcaataaggttgttggaatgggattaatcgtcattaagaaggcctgcataccacctttgacgcctaagttaaattttgtttgatatgcgtaaattgttttaagccagaatagcgcaactgcgaaaaggaagaatccccatcgtgtgcttaatcctgattgaattttatgaccaatttgtttcatcgatacagtagcctccgttaaaggtcgttgggctttaaaagccgttgacaatctgaaagttagtttacacatccgtgaaatgaaaagcaatatgtaaccggcttgaatgccaaatattaaaccatttttaataatctgagtcgcaactgagcaaggctatcacctgcttaagtagcaaaaaaaccatcaagtaattcgatactcaatggttaattaactagtctgctaataaatcgtatagttccattgcaactaaatcaatattgtcaaattggaattgttgatgtgtgttgctgtcttcaagttcaaatgcttgagcttgaggatcatagctaacagttgcttttaaatcgccgtccttttcaaaacgtctttcttgaacctcagcgctttgatcttcttgcattgctaccagacgtttgataatcgcaactaactgtgatgattgcatggcgaagcctcctttaataactaactatcagtttatcagaaaaagagcacttctgcaccgtttatatccaattattttgcagaaggccaccataatttaattaaagcttgggtgccatcgtcgcctaattgtttatcattaacgagctgcgcatagagtttcttagcttgaagcgtagctggtaaatggagccccatcttttcggattccgttaatgcaatctttaaatccttcaaaaaatgttttgcgaaaaagcctggtgtatagtcttgcgctagaatacgtggaccatagtttgcaaggctccagttctgagcactcccaccattaaccgtgtttagaaccgcttctagttctaatccggctgctttagcatacactaacatctctgtcattccggtcattgtgccagcaatcatgatttgattggccatctttgtatgttggcctgtcccggcagcaccgaagcgatggacagtcttacccattgcttcaaaaacgggtaatgccgtttcataggcagcttgatcgccaccgaccataatcgtcaacgtcccgttttgggcgccgatatcgccaccagaaacaggcgcatctaatgcttgcagacctttgtcagctgctgtcttggcaattctctgcgccaatgttggcgtgctggtcgtcatatccaccaaaatctgaccaggttgtgcagcactaaaaattccgtcttcaccataatagatggcttcgacatcttgcggataaccgacgattgataacacaatctgactttgcgcgacaaccgctgctggtgaatcagcccatgttgcaccgagtgccacaactgcatccgctttttgttttgtccggttatacacgacaactggatagtctgccttcaataaattcttgaccatgctactacccatgacacctgttccaatgaagccaattgttggttgcatcaaaaacgcctcctactttttatcagttactcgtggtttaactgctaacgtcccaatccccatgaacatcccgagatagtacgtaaacaatcgccagagcaacatgcctaacaccagtttacttgaactcgggataaaagtggcaaataacgtcttaaaactatattctgccccaccagaaccgcctggaactggaaagagcgagacaatcatgacaatcatgatgtgtaagaccatcacctctaaataattaacatgcgggatgccaagtgccaataagacaaagtatggcacactataatagaaaaaaagttgcccaagggttaaaatacagcccttgattagtttctttttctcgcgtttaaggtgtagactctccgcgtaaaaggtatcgattttggccattaacattgtccgccattccgtcacccgtttttgggagacgaaccagcccaccggaattaataaccagtgcactaactgtttcgtaaatcgattgtaatacatgattagcaacaatacggctaacacaaccacatgcacgattaatccgaaagtaatcaaaatcgacagcgtcccaaaatgcttggaaacttgcgagaaaccaatcatcatacttaataagaaattcaccagtaccatgaattggtaaacaataaacttcatcagcagtactgagctagcttgcccagcttctacacgggattgcatcaacgctaccagttgtgccggttgtccacctgaagaaaacggtgtaatcgcattgaatagttgtgcaatcaacggaatccgaagcgcattgtataaagaaaagtgttctgtgcggtcttttagaaagacgcgtaagacaagtgcttcgaaaaaccacgaaattaacatacataataaggcgaccaacagccaccaaagtttcagatgactaatatcgataaacagctgtttcaacgccagcgtgcgactttcataggcaaaaatcccacacccaatcaacagcatgactgcaaaaacaatcttattcgttctactcataaacgaccctttttcttgttattagcaacgatatgaaaaaactgttgattatatgatcaacagttttccgccaacgcgacttattttttagtatctaaatcttctaattccaataaatcatcttggtctaactttaattcgtcatataatagctgtgattgcttatagaaatgaatcatctgttccgcaaagtaatccgccgaaatagcatgcaacttctttcggcgcggtgctggatcatcaaatgcatgtggatgattcaaataattcgatacttgatggatcatttcatcttcgttcgtaaatgtcgtcccaattgaaggatcagttaataactcagccgcatatggacttgtcatgacgacaatcttgagttcagcggccatcgcttcaatataagttaatccttgtgattcagagtcactggcggagacaaaaagattcgccatatgataataatttgcaacttcatcgttatcaaccattccagtgaaaatcacgtggtcggtcatgtttaacttggcaacctgagcttctaaatcttctcgagctggaccttcaccaacaatcactaacattaaatctggtgtttgggcgactagtttgggtaacgcatcaactaagatatcaatccgtttttcataagcaacgcgactcaatgataagagcacaggttgttctggcgtcaagcccaattcggcccgtatgtcgcgggtcacttcgcgctcaaagcgactaatatcgaccccggtcggaataatccggatgggggccttcacttgatagccatttaaggtttgagaaacccgctctgatggtgccacgatgcctgacatgtgatataaaaaggcctttgtcatttgcttaacatggtatggccgtaataacttcccgtttaaaacatagtgtaaataatcctcgtacatcgtatgatacgtatgtaaacaaggaatttttaaatttttagcgacaaacttcccgatgtagcccatcgaaaattcggtctgggtatgcacgatatcgagatccaattccttagccacttgataagcgtgaaataagccgcgcacagcaattcgccgatccgtaaatgagacaaacgggacactagcaaaccggaaaatattcggttcgactgcatctttgtcaacatgtggatcggtcgttgtaaatatgtagaccgaatgcccttgtttttctagggcttcttttaatgttttaatggaggttgccacaccactgacttgtggaaagtaggtgtccgtaaatatcccaatattcaattggtttcctcctccttatctttggacatttgatttcattataataattacatcgcctagatgcaatcaatgtcactaattgtaatctattcatactagcataaaaaccgtctttagacctaaaaaacagccaatttacgttaaaaaacgggcactgcacagtttttgtgcggcgcccgtttttttattttagcgtaaccaatacgtaattgagaagattattaaacaccaaatcggtaatgccactaacaggccgttgcgaatacccataaaaaatttcatcatcccacctcatttcataaaccaatacgaacagcttgctatttagggtcactgtctactatgataaaggtaagtttaggcttcatttattaagaactaccgtgcttttacttaagaatgattaaaggagcaagcgatgcaaacttatctcattaaaaaacctcaaaaactcgaattaacctatgacgaaaatatcctaacaattcactatcccggactgtttaagaagaaacaaaaccaggatcgtgacattccgtttagcaaattaaaatcagtccgcttttttgaagcgacttatcggcatggtcatctccaaattctctaccaaaaacccaaccacgccctcgaaaaaatcgtcatcagtttcgaacccgacgataacctcgctgtgcgcaagttatacacagccttagcggactatctcgaaaaaccaaccgttgaagaagacctcagttatgttaagaccggtgatcttatcatggcttacctcaaaatgcgcgacgacggcctaatgacccacgaagaattcgaagaaaaaaagaaaagaatactaggaatggaatagagtgcgcagtaagcccggttatcttctgaggattagcttaatcaggcggattgccgacaaagtcggtgatttgactgatgtcgctaaccggaagaagatggcttacggagcacgtttcaaagtagagtgcgacggcagacgattatacgctgaggattagcctaatctcgtgaataagcgacgacgtcgattgtttgcgggacgtagctaaccggaagcggatgtctgtcggagcacgttttaaatcagagtgcgcagtaagcccggttatcttctgcggattagcctaattcaccacaaaaaaaagggccaacgacaaacatgtttgtcgttggccctttttttaatcctcgcgagatactgagctaataaaccactctttatttctttataaaaccaattgccatcccgatgattaagatgaccaacacaataaccgtaatccaaacgtagaggtaatccccttctttagcaaatgcgtagattgataccaccacacgcaagactggcgttaaaatgaggcagaataagcccaacataatcacagcgccagccttaaatgcagcaatgccactgaaaatttcggtaaaggtcgttggaaattgatattctgaataacctgtaccgccatgaataatcgcaagtaacatgccaataatgagcagcgttgctgaaaccgccaccccaatgcgtaaaattttaccgatgacgagttcaatttgagccatctctgcttttttatctgtcattaaatatgcaccccgaatcctttaagcaccatttgtaaacctgtgtataacaaaatggggataaaaatcatgcgaatcacacgtggttgcaaatactgcataatccgtgaacccacagtggaacccaccaaaattccgattgctaacggtgcagcaacgctgggaataatcgcaccgctgaagaaataaacagtggccgaagctgctgccgtaacccccatcatcaaattactcgtggcacttgatggtttcaatggcatcttcataatcgtatccatggcggtcactttgaataccccactcccgataccgagcaagccagaagcaatgccggccccgaacatcatggcaaagccgcctggtacttgttcaacagcgtagtcgacttgttcttggttggccttatcgtagtaagtgccatttaagttcaacttcttggcccacttatcttcaccagcgccgacgtgttgttctgcaactttaccacgtaatttttgaatcatgttgtacgttgaaaatagcaagaatgcgccgaataagatgaataagaatccagttggtacaatgccggtcaataacgccccgataatcgccccgacggtcgttgcgatttctaggaacatcgccactcgtaagttgagcatatcatctttcaaataggcgatagttgcaccagaacttgttgcaatcacggcaataatgctggccccaatcgcgtatttaatatctaggccaatcgctagcgttaatacgggggttacaatgatcccgccaccaatccctaagattgaacccaacacgccggctaaaacaccgacggcaagtaataaaataatttgttgcatctcttttctcctcttaatgcatttttataaccgtttttcgcctgttagtgcacggagttccgttaaatcctgactgacttctaaacagcctaagtattgtccctgtggattacgaaccgcaaaatagcgaatatagacgaacatcccgcggaagttcaaccaaaaatcagcgttgtcttctcgccctgcatgaaagtccgctaaaattttctcaaccttatccacactctttggtggatggcagttcacaactgcgcggccaatcactgcccgggttcttgggaaaatacgatgctcgttatctgagaaccaccgcacaatatcgttttgatcgacaaaggttaaatcaagcggtagtacttggagaatcgccgtcaattcgctgatattcatcgacccagatggtagaacgattttagcttggttatccacgccaatttcgatatggggttgtggtgcttcccgacgtgcttgaaccttcgcttttggtgccgcttctttttcgtcagctaacattgccttcacaaaatctggcatttctggttttccttcatctttttcagcgggggcttttggtacaggttgtccgtgaatttcaaacggaatattagccgctgccgccatcgaagttggtgccggttctggtggcgttgtttggatcgtcatttgcgcatccgccaacgattgcgccatcgcattcagttcttgcgcaatcttcggcacggtccgcttttcgaccgccgcaatagcttcagcacttggttgccatggtaatgggtctggaattaaggtatacccgattggttggctttcagaagcaattagtccccagtcagctggtgtaaagacttcattaaccatcggaatcatgatttcttcttctttgaaaatcatttcttgaatttctttgctaatcttttcaacggctgcttcaattgcatatttatccggaattggttccgcagttaccatttgataggccgtcttcaccaacccccgaatttgatcatccaccccccacatcactttgggtggtgcagtaatcccatattgatccatcaacggaaaaattaagttttctttccgtaaatagtggcggtcgatcaactgtaaatcttttaacgcttgttgcatccgcacgagataattttggtcagtccctgactgctgccatttcttcaaacatggcagtaattcatcatttaagagcgagttcatgaccaaattttctaatttcatcacagcgactgggtgtcctggctgttcttgttccggcgtttcagccccatttgaattaatcgcccccttgaaaaccgcagcatggacattacacaaatgttgaatctccatcgggttcaagccactggcaatcaattcccgttcagcagacgtaatttcagacacgtcaaccccagaaaaggactcatcaaaaaaaggactcatcaaaaatccgcttagcctcttcaaacgagccaccttcatgcagcatttttaagatttccacgattcgtttttggcggtacgcactgctatgctgttgctcacacatcagctaacacctcgaatccttgtgcttctagactagcgataatcgtcgtcaaaggaatttgcttcatcttagctcctttaggcaatgtcataaaacgccccgcagtattcaaaagcgctgggttcgtgaccccatcaagcccaatttcaacaagcaccgacaccacttcaggataggccgttaccaattcataaacggtttgacttaatttaatttgttttgccatcataatctccttagtcagcgttatttttcaatccagccaccatcaattggaacgacggtgccatgaatgtaatccgcaacatcactcgccaagtaaacacttaagctcgcaacttcagttggttgtgcccaacgccccgctggtgtctgacgggcaacttcttgtgccatctcaccagtccccgaaaaatcggctgcgttcatcggcgtctcaatcgcacctggggcgatacagttggcgcgaatccccttagcggcgtaatcataatcaagctgctttgtatagccaatgatggcgtgtttcgatgccgtataagccgcaccaccgccaccagcaactagcccagcaatcgaagccatattaacgaataccccacgcttttgcgcaaccattgttggcaagatcgcatttgttacaagatattgactttttaaattcgttgccataattcgatcccaatccgcactactggtatcaagcgttggtgcataagcatccaacacgcctgccgtgttgcagaccacatcgattgggccatgttctgccagcaaagtcgctaatgtcattgttaattgcgtttcatcacaaacatcaacctgcgctgtgatgcaccgactatcaacagggacttcaatcggctggcgatcaagtgctaacaccaatgccccctctgctaaaaaagcgtccacttgagcgcacccaattcccgatgccgccccggtaattaaaatggttttagtcgctaaatctgcaaaatgccccattagtcgaccaattgccaatcatcagccaatacatcacacgatgttggttggaacattgagtatgctggtgtttcggttgttttaattaataggtagggactaattgcttgcccctcgaatgtcccatcggccacttggaaaataaataattctggaccatcccagccagtccgtaccacttttttgccagccttaattgcattaatcgcttcatcaaatcccatgatcattacctcatttaacttaattttttaaaatgttgaacaatcaaccttatatgatattctagcacgccactcaaatcggtaccaattaaaatcacaggcaattcgattcaaaaaaaggtgtgaccaatattggtcacaccttcctgaagttaatttgatttgcgtttaaacacacgcttaatcacatcccagacccctagtgattgaactaagcgttctgcgggcacatactcgcgaatggcgcggagtacttttttgggttcctttgaagcaaaagtatacgtcccatttttctttgtttggatagcatagcggggaatccacttgcctttgaacatgactgatgcaatcacatagtcaacttcttcccatggaatttgaataaattgtcgtgcgtcacgatcattgaaaaattcaaaccctctatccccgatcatgatttgtccgtaatcagagagtgctgtaaacgacgtggctttaatcactaagtccacctttgtattaatcgattgaaccataatatcgactccatttccaaaaacttactttcattatacgcttttataaaaaggaggggctaggacaaattgactttgtcctagcccctcctttgttttctaaacgtgcttcagtaggcatattcctgcggttaaccaaatttgccaaatcggcgattgcatcgccaattcgtcaaatccagttaatcctcaaaatataggcgcctgcttatgcactcttttacattaagtgtaatagatggaagacaattccgactacgaataagccaagaataatcacgattggtgagactttcttcttaagtaaccacatacagaataatgttaatcctaatgcagctaacccaggaattaaactatccaagttgtcttgcaacgttgtcactttattgcttgtcaatgacaaaccttgagcttgttgttgtaaggctgattggatacccttagcaccgctaggtaatttatcccagtcgatgaatgcgcctttgtccaacttaacagatgaaacaactggcgtaaacttgacagatacccaacggttaaccaacgaacctaagatgaacatcccaaggattgaagcaccctttgtgatgtcttgcaaaataccaccagataaatcttctgtaatctttgaaccagcacggtagccgaattcttgtgtataccacatgaatgacatccggatagcattccaagcgataaagtaaatgattgggccaagaatgttaccactcatagcaagtgaagcagccaaagcaccgatgattggtttaacagtgaaccagaatacgggatcgccgataccagccaaaggtcccatcatcccaactttaaccccttgaattgtaacatcatcaattggtgcaccattagcacgttcttcttcaagtgccaaagttaccccgatgattggtgaagcaacataaggatgagtattaaagaattccatgtgacgaactaaagcagctgcccggtcttcttttgttttgtataatttcttaattgctgggattaatgagtaagcccaaccaccattttgcatacgttcgtagttccaagaaccttgaaggaaagttgaacgtagccaaacagaaatacgatctttacgcgttaattttaattgttctgccataattgttagcctccttcttagtagttgtcgataatatcgccaagtgggtcaccagtatttgaaccgccgccattacctgagccgccttgttttgaaagggctaagtataatagggcaagtgaaacaccgattgcaccaaggccgataagtgtcaattgtgagatagtagcaagtacgaaaccaattgcgaagaatggccatacttctttagttgccatcatgttgataaccattgcgtaaccaacggcaacgaccatcccaccaccgattgctaaaccgtctgttaaccagattggcattgctgtcaacatttctttaacagggccagcaccgattgctaagattaagcctgcaggaatagcgattcgtaaaccttgcatgataatagcgatatattgccacatttcgatcttacggaagttaccttctttagcagcagcatccatgatgtgcacgataccagttgctaatgtccgtacgatgattgttaataataacccggctacggcaagaggaacagcgatagcgatagctgatgtaacgccggcttttccttggccaccaagtattaaaataattgcagatgcgattgatgccaaagcagcatcgggtgcaacagcggcaccaatgttagcccaacctaaggcgatcatttgtaatgtcccacctaagataagacaaggtagtaattgaccggttacaagaccgattagtgtacaagcaataactggctgatggaaatggaattgatctaagataccttccataccagctagaaatgcgataaaaatgaccaaaatcacttgaatgaaattcaaatccatgattattaatcctccaatttcttctgatgttatttgttattttgtttgtctagttctgcttgtgcttttttaaggatactatccatgttaccgtttgagtcacttggcactttacgaacatcgaacttgatgcccttagcttttagtttttcaaaggtatcaatatcatcttggtcaaaagccaaaacagtatttggttgcactttaccagttgagtgcgccattgaaccaacgttaattgtttctaatggaacgccaccttcaactgctctaagtgcatcttgtggtgattcaaataataacaaagcacgttccttaccaaagtgttggtcatcttttgccaatttaatcatttgatcaactggcacgacgtgtgctttgatgccactaggagcagcttgtttaattaagtttgtccgtaattcatctttagcaacgttatctgaaacaacgataatccgtgttgggttagttgtcttcgaccatgtcgttgcaacttgaccatgtaataaacgtgaatcaattcgtgccaagacatatttgaacttaccaggtgtgcctgagtttgaagtcgtttgtgcggcttctgccttaggtgcttcttctggttgtagttcttcaggtttaacccgtacccctgctttagcttcatcaatgatatgtgctgcgatttcatgagcagatgtcatagataaacgagatgcgtaagcttcaatcaacattggtaagtttaatcctgtaacgattgcccacttatctttatgtgcttcgaacaacccattagcttgattaaatggtgaacctccccaaagatcaactaagaataagacgtcatcatctgcatcaaacgttgcaacggcagcttctaaatgcgctttcaaatcatctggtccttcatttggcataaaagtaacagcttgtactttttcttgttcgccaaaaatcattgagccagattgcatgattcctttagcaaactccccgtgacttgcaataacgattccaaccattcacaaaaacctccttaataaaaatagttgtcatactcatcaataaaacgctatcaattaatataaaaaaataatggcttaaacattattgactgagttaacagttccacgtttttattttttaaaacgctttactgaattaattttaccacaaaattctaatctgtctaatcattttttagattatcgacaaaaaagcgctaaaagtcgcattacttaagcttttataattagataccgctaatgtttgcggtgtgctaaaatcgttttttatacaaaaaagaccttaaatcgattgatttaaggtctttgctttatttaagttcattgccactcatatattgttgatatttttgttcatcaaattcgttctctgacttggcaataatgactgctgctaatgagtttcccattacgttaacggcagttcgtcccatatccacaatccgatcaatccccgcaatgaaggcgacaccagcagccggaacgccgattgtggtgattgttgctaataagacaacgaatgaagcaccagggaccccagccatccctttagaggtaatcatcaagaccaccaatagcgtaatttgttgggtgaggcttaaatgaatgtgataggcttgcgccaaaaacagcgccgctagcgattggtagattgccgaaccgtccaagttaaatgaataacccgttggaatgacaaaagaagcaatcccttgactaacaccgtaattttgcactttttccattactttgggtaacgctgcttctgaactcgccgttgaaaaggctagcaccaattcttctttgaaaactttcaagatttcaaagatattgatgtgccaaatccgcgcgaccaacccagccacaacaaccacgaaaaatgccatcgttgcgtaacaaacgatgatgaaatagagcaatggtttcaaagcttcaaatccgaattgggcaattgtaaccccgattaatgcaaacaccccgattggtgctaactgcataatccagtttgtcatcttgaacataacctctgaaatcatttcaaaagcatcgatgagcggggttgcctttttaccaaaggtcgccaaccctaaaccgaacatgaccgtaaagaagatgactggaatcatttcaccagaccccaaggccgcaaagaaattcgttggcacgatatccatgatgatatcacccaagccatgatttccagcggtcttagcggctgctgtgtactgactaattgagccatgtgccaaactatgaatgtcaatcagcgctcctggtttagcaatattgccgacagctaatccgagaataattgcgaaggtcgtcatcacttcgaaatacaataacgtcttaccaccaattcggccaagttttttgatatcacccatcttggcaatcccaacgaccaaacaggaaacaacaattggtaacacaatcatcttaattaaattgatgaacaaggttccaattgattgtaagattgagatagcggtttgattatggtagaaaaaccgaccaaccactaaccctaggccgattccaattaagattcgccaacctaggctaattctaaaatatcgttgctttttcatgttttatccactcctcttgaatgccgcaaatcggcttttaaattgccaataagtccattaagtgttcaatttcgtgtgttggctgtatgtctgtcatttgatttgctagctggttcgggttataccacgctgtggcgacacccacgttctgcccaccttgcacatctgaagtaagtgaatcaccgacaatcaaagcttctgcttgtgagatcccctctaattgttggaagacactttggaaataccgtggatctggtttttgatatcccaactcttccgaaacaaaaacggcatcgaaatatgtgattaatcctgaatcttgtaaccgccgatattgcgtgttggcaaccccgttggttgtgacatatagcttaatgttagctgcttttaacgcctttaacagagcttctgcttgtggcattaaatcatggcctaatgccaagttgtctaaataattttgggacaatcttggtccatcaacttcctgattaaactgttctttaaagaaggttgcaaagcgtgtgttcaataatatttcccgggttaacgtaccttcttcatactgccgccacaagttttgattaaaggtctgataagttgtcttaattgttggggtcaattgaaccccttgatctttgaataattgggccaaagcttgatcttcatccgcatcaaaatcgaataaagtattgtccatgtcaaaaaataaataacgatactgcattgtaaatcctcatttcaactaatctaaatattgtaatttgcctctaaagtcagacagtttagtataacctttttgagccatgcttgtctgtaattcgcgcgttaaacgttcaaaaataatggggccttctttttgaagcgctgtcccaacttggaccatgctagccccacataaaatatgttcaaatgcatcttgacctgatttaatcccaccagtcccaataatttgaatggctggattcaaacgctgatagaaggcatggacattcgctaaggcggttggtttgatataatcgccaccgatgccaccgaaaccatgcttaggtttaatcacaacccgttcagttgccacatcaattttcaagccatttccaatgctattcaccgaattgacaaacgctaatggaaattgattcaaaatcgccgccatctgatcaaaatgcacgatatcaaagtacggcggtaatttaacgcctaatggaccgtgataaaccgtaaaaactcgcgttagaattcgttccaccatttcaaaatcatagcccgtttgcggcttccccggtacgttcggacaagataagttcaattccaccacacctttaaaatcagaagcactaatctgtgccaacagttgctcgtcttcttcaatattaaatcccgtaatcgattgaaagtatgtcttgtctggcactgccttttgctgttgactcacatagtctaaataataaggtaggccttcattcggcaagcccattgaattgatactgcctaaacgcgttggttgataacgtggttctgaatttccagagcggggcataacggtggcactcttggtcacgaaagtccctgccattgaagcctgcacttgatttaactcagcagcatcataacaataaacccccgccgcgttcatgaaacagttatcaaagtggtacccagctagtgtcgtttcagtcgaaatcaatattcttgcctcatctctaatttgtttttaatttattatacgttaaatggcatcaaaaaaccactgtttatgaatatcattcgtaaataacgtgatataaaatccattccctcttttttaaacctaattaaccgaacaaccaataacgcagcacatataaaaatcccttggtagtgaatagagataatacttccatctattcattatcaagggattattttcgaatccattctaaccgatgacgcgctcaggattgggacttcattgaatcaggcttttttcgcttgtcgttttagaaaaataatatacccaactaagagcaccaggaatatgccaccgcatgatataccaccagttaatggttgttttttgtaaatcaacggcttggtcattagcttgatgggctttttgctctgtaatattaaaccgactcgtaaaataccactaaccgcccgacttatcagtggcggttagcttaagcatttatttgcccggattcagcgcttcattatcccagttgatggcgtactcaaagttcgaattcggtgccatcgcaatgtctgatttgactgtccggtgaagcacttgatcagagcctaacttggtaaccaccgcatcaactttcaagcctctgatcataacagcctttgtattctgtaaattagccgtaattgctgtccgatagttaacgagccccgctttgatgtgattcagtttcagatttggcgcaataatggcatcactttcggtcactttcagaccgattacataagcgaattggttacgcaatgtcacgcgattcttttgctttttaacggtaggctgcccttcacgaacaatattaaaaccacctaataaagtacaatggaacttcttagcaggcattttaattttgaaaatggcgtccttgctactgtgagccggcaccgttacttttttatcccccgtaatcagtgaggcaatattagcaggcgccgtttcatccgcttttttctttgactggctataatcaacgaccccgttttgattagtcaccgccgtattcggactgatgttaaagatatgcgcttggttatccttattttgcaccgtgatactaatcgtctcttcctgattaggtgccagccttaaatcaaaatacgttacactttgattgttttgactgctgggtaaattcgctttaacttggtaattcatactctgatcagccgcttggacggtcgttgtattcaaccacaacgcgatgccgcccattaagatgacgacgctgattctttgtaaaatatgcatccatttcatttttgaagtccctctctttaatcactttgcacatcgattaaaatttagtccgttgcagtaacgacttaacacttgcctctttcaaatttagcggctgctgccagctaattgaagcggtgtatccccaagtgtccaggtcaaatcagcattatagctgccagcataagcgccaccagcgatatccagtgtaatgccgtcagttgtcatcacatctgcccatgttcccatccctttatctttatcagcactcatcaagatttgcgcattatccaacccatcagcaggaacagtaatcgctttggctgttggtgcagcagtattcgttgaatcactagcgactactttaccgactggaaaattaatctgtgcgccttttaagatatgcgttgaatccgttgtgtctttaaattctgaacttttaacggtaatattccagccagcgccagttccccgtttatcggtgacttgtacgttaggatctttaacgatattcttaacgttttgcgcgccaccagtcagtttcaccttaccaaaatcaagtggtgttaaattatcaatcctgatatcccctgttgcgccagttggtccgtttccgtttccatctgtccctggcacaattggtgggttagtcgttgttgtgtcccctgcttctagtgcaattttcctcgtagttgtttcattcgatgttgtcgcagcctgtacacttggtgccatcacgatatggcctaatgttactaatgataaataatcaccattttgcggtttttgaagttgtagatggtttagcgcgtacaagcgacttggtaaacgctgatatgcactatcttgtcctggaaaattataagcaacatggcctctatctgggccatcattgggtagcaaaccgtcaaaatcattgccattatggtacgtatcgaattcaacggcaaatgacttggcgattgctgagttatcttttacccaagaaaatggattccgccaaacaccaagggcgccaccggtcacttgctgccaattcttaaccttgtctgggtcattcatcattgcaaaggccatcccgtcacccgattgcgcttttttgtcccctaaattgacatacattaaacttgtaaaattatgtgtcaaatcaatcttatactgctcttccgaccaaattgcccccttcttgttctggctatctggtgtcacttgcacaattccacctgcttgaacggaactatctaccccaatggagggtttaaaaatgccatcgattggaatatgggcgggtatcgctgcttgagtacggccactattgatacagataaacgccaataacatggtcagcattgttgcacccagcgctaattttcttctatccatcgtctacctccatatgatttttctatttttccattcatcactacacctttggtacggtctagttatcaattgggatatcaaagattcaatcaattaatcaccaattggacttaatgttttttcattctgccaagctattaaattgtgtacaagttgttttaaaacgaatctgttaaatcttttaaagagataatccctatctatgattatgcaacatgcgtaaacttctttaatgccgatatttgtattcggttccatgtcatcaaaatggtcgcgctggagcttcattttatccgcattttttatcatctaattttaatatttttctaattaacattggtagaatatttttacaacaatgcctatatatcagtatttgtacccatgaacatccctttaaacattaaatttaaggcatgcaaaaaagcccccagagatgattaaatgaaatgcatttaatttcctctggaggcttttttcaaatggttgtttattcagtcaattacggcattaacgaattgcaactgcttctatctcaacaattgcgccagctggtagtttaccaacttgaacggcacttctagccggtgcgatatcaccgaagaagcgcgcatatacttcattgaattcgttaaagtcatccaaatcagttaaaaaacaattggttttcacaacgttttctagggataatcctgctgccgctaacacgtgttgcatattcgtgattgcttgttttgtttgactcgctaagtccggtgccaattggccaccttttaatccgagttgccctgacataaaaaccagttgatccgttgcaatcgcttggctgtatggtcccaatggttcaggtgctaagttagtgtagattttctctgtcatgctatcgtccccttcacattattgaatccgttttcattgtaatgcactttaccgcctttgacaacattctttgtgtttctttgcacaaaaaaagcgccgtctcaattaattgagacggcgcgctgggggtaaaatttaggggagtgttagctgaacgacacatttaagctttagatatattgaacaatttgcatcaagattgggacaacgaccacgaataagacggtacttgttgtgacaacgttcgttgcatattcaacgtcaccatgtgattgaccaactaagattggtaagacagccaaaccaggtgttgcagcttgaataatcaatgtgctttgttcgattgatggaattgaagttgtgttcttgaagaatagcatgatggcaatcatgatggctggtgccacaacgaaacggcctaataacgcaaggactgtatcgcggtcgaaatggattgatttcaaaccagcatcagctaagataatcccaatgtagatcaatgacattggtgttacgatgccaccgaccattgagaatgtcttatcaacaagttctggtaatggtaaaccagttaaaagataaattaatgcggctaagaaaccgattaatggtgaaggtaataatttacgccagttaaatttgcctttagcagcgcctttttctttggttggatcatcatttgagatgaagaagaccccgattgcccatgttgaaaccgtattggccacatagtagatcaagaagtaaggtaaactcttgtcaccgaatagtgccaagttcaatggtaacccaatgaagatggtattagcattgacgaacatattgataaatgtccctcgacgacctggccgaatccggaaagccttggttagtaaccatgccacgagataaccgagggcgaaactaattaagacgtagatcaagccgccagataaaccgaccaacttttcacgggttaagttatctaatactgagacgaaaattgataatggtaaagcgacattcatgattaaaaatgaaattgtgcctttaaaattatcatcgaatttttttgaactccgtagccaaaaccccaatgcaatgactaagacgatttcgacaacgcttgataatgatgttagaaatgctgccaactctttcacgctcctaccgatttatatttaaattatagtgctttgtattctggttcccatttcatgtctgcgacggctttttgcacgtcagcaattggttctttattcaaaccttgatcaacagcgctttgagcaacagcgttcgcaaccgtttgtgagaagatatctagttttgtcacaggaggtaagacagctgcgccaggttctgttggatcaacgatgccacccaatgagtgagctgctttgctaatcatttcgtcatttaagactttcgcagttgacgcgattgtgcctaaaccaagccctggatagactaaagcgttgtttgcttgaccgatttcatatgtgacaccgttgtattcaacaggtgcagcaggaatcccagtcgctactaaagctttgccgtcagtccacttgattaagtctgcagcagttgcttcagctaatttcgttgggtttgacaatgggaaaataattgggcgttctgtgtgagcagccatttccttcacgattgattctgtaaaggtcccaggttgggttgaagtccccactaaaatggttgggtggattgctttgacagcagcttctaaagttgttaattcatcagcattcgcgaattcactccgtttgcgcgcaaatggtttttgttctggtgttaattctggatcatcatcaaacaatagcccttgcttgtcaaccatgtagaaacggctacgtgcttgttcttcagttaaaccttcttgtaacatttcttcgaagatgcggtgagtaatcccagcaccggcagtcccagcaccaaagctcatgtaaacttggtcggtcatcttgccaccagagatatttaaagcgcccataatcccagctaatgtgataatccctgtgccttggatatcatcattgaacgtcacgatttgatctttgtacttgttcaagatattagcagcattgctccggccaaaatcttcaaagtgaagatacatattagggaataggtcttcagctgtttgcacgaattgatcgacgaaatcgtagtaacgatcgccgcgaacccgttcatgacggttgcctaagtataactcatcattgagtaagctttcacggttcgtcccagcatctaaaacaactggtaagacttgactaggatcaatcccggcagcagccgtataaaccattaatttaccaactgagatatccacaccttgtgtgccccagtcgccaatccctaagattccttcgccatcagtcacaacgattaatttaatttcgcgaccatcagcagcgtttgccaaggttgtcttcattgaatcaggatcgtcgattgataagaaagcagcgttttgggggttcacatataaagcactgtagttttcgattgtgtcagcgatcgttggatcgtaaaccactggcatgaattcagcaacatgttggctgaataatttaaagaacaacacacggttttcattaaaaattgacattaagaaaatccgttgttcaagcatgttggcttttgattgatattgggcataagcttgtttaacttgttcatcaatggtttgcacgtgaggtggtaacatccccgttaaaccaaattgtgcacgttcttcagcagtgaatgctgtacccttatttaaaaatggatcatttaaaatttgttgtgctttcatattaaaaatctccttttcttttatatcatgttggtcactatacacgcctcaacatttgatagtcaaaacttacatttatgataaaatagatttatatgaaacgtctaaactgcattaaacaggagtttttatgaagattaaagatttggcctattttgctgcgctaattaaattaaaaaattttacggcagtcgctgatcaattcaaggtcagtcaaccgacgatcacttacgcggtcaaacgccttgaagatgaattcgcgaccaaactcattcagcgcgatcaatcacaccaatcattgattattacccctagtggtgagcaactttatcaacatgccgcgcgaatattagcggagattgaactaacaaaggccgacatgctcaatctcaacgctactgatttgcgttttggcttgccaccaattatcggcacttactacttctcaaaattagcacaaaagctagccgctaacggcacgattcaacattttaagacagctgatgggggttccaaagaattgttggcttcattagaagccggtgaactagatgtcgcgcttcttggctctgcgacgccacttcaaaccgataccatcacagctaaagtcatcgaacgtcaccattttaagattgtagttgcacctgatagtcccttagcccagaaaccagcggtcgcctttcgtgatttagcccacgagaaatttattatgctcgcggaaggattcgtgcatcccgtggtcttcaagaacttatcggacgtcaatcaaatcaaacccgaaattatttaccgcaccaatgacgttagtgtcttaaaaagtatggttcacgaaaatgtcggcatcggttttctaactgaaaccagtgttacgcctgctgatgacttagtggtacttgatttattggatgaaccacaaccaatcttttacatctcgttagcctatcgtaagacccagttcttttcaccaaaacaacaagctctcatttcgaatctcgaacaagcagcgcgagactaccgtcttgaacattaaaaaagtggtggcgacaaaattaatttttgtcgccaccactttttaagtatgttttaccataaaaacgctaagacagtttgattgactgcatgattttggtgtaattgactatgctgcgcttttttaccagtaaacttcttttcttgataggtcttcgcaccaggcgtcaccaaataccgcaacgactgtgacgatgcattactaacacgtccgtcagaatgcgtcccatcgcctaaatccccatagatattcaacaccgtaatcgatttagcagggagctggttacgcagtcccatcagttgccgataagtcgcgttcattttttgtggttggccatcctttttaggtagattgcaaatttaatccgaatttttggacaaatttgtcagcataacctgatacggtgtttgccagtcgagtattttaagcggtcgctggttaatttggagtaacgtcgtcgttaaatcttgagcactaatgtgctcaaaacgagtccctttaggataaaaataacgtaaattccgattaaagcgttcattactaccacgttcagctggcgtataagcatggcagtaataggtcttaataccatattgtgattcaagtgatactagcccactaaactcagtgccacggtccaccgtaaaactatgcaccgggccattaaaagttgctagaaacttatttagggcttcattaacagtcgctgtcgtccgatcttttaaccggtatgcccaaaggaaccgtgattttcgatcgattaaagttaataaaactgccttactatgcccacgaggaccaacgactgtatctagttcaaaatcgccgatgcgcttacgttgattaatcatcatgggacgctgttcaattgatcgccccaaggattgattatatttggatcgttggtcaacgttacgccgttggcgtacgccatgttcaggtagatcattcaaggagaaaccaattctcccctgatttagccaattataaatagatttagtagctagtttaaattcgtgagcaatcattcctggtgaccagcttagacgtaaatggttgagaattttttgctttaactcatcgctcagcttagttttccgaccacatcgtgatcgcttgtattcggcatctgtttgtgctaattcagcctgataaggttgacatcgagataattcataagaaattgttgacggtgatcggttcagccgaacgcccatttggatattggacagccctagttcacaaaaggtttcgattttaattcgttcggaataggttatactagacaaaagatcagctcctaaaagatgggtttgtggtaaacaccattttaaaggaagctgatcttttttgtccgaacagcgttcggattaattttacaatctaccaattaactattagtattcaaaagaaccatggtattaacgcaacaaaaaaagccctatctctaaggctttttaaaactgtataatgttcaattataccggtgatcggggtcgaaccgatacttccgtgaggaaacgggattttgaatcccgcgcgtctgccaattccgccacaccggcattttgaccaattaaggttagcgcctaaacgcaaaggcggtaaccggatttgaaccggtgataaaggttttgcagacctctgccttaccacttggctataccgccataaaagaacaaatcctgtcccttaaaaagtaaattgggctagctggattcgaaccagcgcatgacaggatcaaaacctgttgccttaccgcttggccatagcccaagaataaaggcggtatgtgggaatcgaacccacgtatgtcggatccacaaaccgatgtgttaaccacttcaccaataccgccatcattaacatgaataattatactacattcacacataatatgcaagctataatataaacagggatagtaggaattgaacccacactgacggttttggagaccgtagttctacctttaaactatatccctaaaaaatatggaggagagtggattcgaaccaccgaacccgaaggagcggatttacagtccgccgcgtttagccacttcgctactcctccaaaaatggcgcaggacagaatcgaactgccgacacatggagcttcaatccattgctctaccaactgagctactgagccattttgaaacggtcacaacgggactcgaacccgtgatctcctgcgtgacaggcaggcgtcctaaccagctagaccatgcgaccaaattgcgggagtagggtttgaacctacgaccttcgggttatgagcccgacgagctaccagactgctccatcccgcgataatataaaggagaatgagagattcgaactctcgcgtgggcagaacccacctgacggttttcaagaccgttcccttcagccagacttgggtaattctccataaaacatataaaatgtaacattgttacaatgacccgtacgggatttgaacccatgataccgccgtgaaagggcggtgtcttaaccacttgaccaacgggccatacaaaacggagaaggagggatttgaaccctcgcgccagtttcccgacctacacccttagcaggggcgcctcttcagccacttgagtacttctccatattatttagataatgggcctaaatggactcgaaccatcgacctcacgcttatcaggcgtgcgctctaaccagctgagctataggcccatgaaaagcgggtgacgagaatcggactcgcgacaacagcttggaaggctgtggttttaccactaaactacacccgcatattcatgatatggcgcaggacagaatcgaactgccgacacatggagcttcaatccattgctctaccaactgagctactgagccattttgaaacggtcacaacgggactcgaacccgtgatctcctgcgtgacaggcaggcgtcctaaccagctagaccatgcgaccaaattgcgggagtagggtttgaacctacgaccttcgggttatgagcccgacgagctaccagactgctccatcccgcgataatataaaaatattataaccacctacaaaatctcaccaaacgatggaccttgtaggactcgaacctacgaccgggcggttatgagccgtctgctctaaccaactgagctaaaggtccaagttttttgaaaaatagcggcgaaggggatcgaacccccgacctcccgggtatgaaccggacgctctagccagctgagctacaccgccaaaaaacttaaatttataacatgtaacttacgttacaatcgggaaaacaggattcgaacctgcgaccccctggtcccaaaccaggtgctctaccaagctgagctatttcccgttatatgcacccagtaggagtcgaacctacaaccttctgattcgtagtcagacactctatccagttgcgctatgggtgcatttttcattatgatgccgaggaccggaatcgaaccggtacggtagtcacctaccgcgggattttaagtcccgtgcgtctgccagttccgccaccccggcttaatcataatgaaagcggaagacgggattcgaacccgcgacccccaccatggcaaggtgatgttctaccactgaactacttccgcatcttaatgccgactagacgattcgaacgcccgaccctctgattacaaatcagatgctctaccaactgagctaagtcggcataataagataactttcattgaatattcaattgaatgcgggtgaagggacttgaacccccacgtctatatagacactagaacctaaatctagcgcgtctgccaattccgccacacccgcattttggcgtgtaacttggccgatgagtcgtgacaggctcgaactgtcgaccctctgattaaaagtcagatgctctaccaactgagctaacgactcaatggaggttacagggctcgaacctgtgaccctctgcttgtaaggcagacgctctcccaactgagctaaacctccatcaataaaagcgcggcaacgtcctatcctcgcaggtagtttcccaccaactactatcggcgctaagaagcttaacttctgtgttcgacatgggaacaggtgtatccttcttgctatcgccaccacactattttatgcttgcgcactgagaagaacttcgttctctcaaaactgcataataagtaatatttcatttcaaaagcctaacattgcacctttggttaagtcctcgaccgattagtactagtccgctccatacatcgctgtacttccactcctagcctatctacctgatcatctttcaggggtcttacttccataaaggaatgggaaatctcatctcgaggggggcttcacacttagatgctttcagcgtttatcccgtccatacatagctacccagcgatgcgcctggcggcacaactggtacaccagaggtatgtccatcccggtcctctcgtactaaggacagctcctctcaaatttcctgcgcccgcgacggatagggaccgaactgtctcacgacgttctgaacccagctcgcgtaccgctttaatgggcgaacagcccaacccttgggaccgactacagccccaggatgcgatgagccgacatcgaggtgccaaacctccccgtcgatgtggactcttgggggagataagcctgttatccccagggtagcttttatccgttgagcgatggcccttccatacggaaccaccggatcactaagtccgactttcgtccctgctcgatttgtcaatctcacagtcaagctctcttatacctttacactctacgaatgatttccaaccattctgagagaacctttgagcgcctccgttacactttaggaggcgaccgccccagtcaaactgcccacctgacactgtctcccgccacgctaagtggcgcgggttagagtggtcatacagttagggtagtatcccaccaacgcctccatcgaaactagcgttccgatttctacggctcctacctatcctgtacaaactgtacaaacactcaatatcaagctacagtaaagctccatggggtctttccgtcctgtcgcgggtaacccgcatcttcacgggtattataatttcaccgagtctctcgttgagacagtgcccaaatcattacgcctttcgtgcgggtcggaacttacccgacaaggaatttcgctaccttaggaccgttatagttacggccgccgtttactggggcttcaattctgggcttcgcttacgctaactcatcctcttaaccttccagcaccgggcaggcgtcagcccctatacgtcatctttcgattttgcagagacctgtgtttttgataaacagttgtttgggcctattcactgcggctgacctgacggtcagcaccccttctcccgaagttacggggtcattttgccgagttccttaacgagagttcactcgctcaccttaggatattctcctcgaccacctgtgtcggtttacggtacgggtagtttatttctcactagaagcttttcttggcagtgtaacatcaggaacttcgctacttaatttcgctccccatcacaacttgtccttaaagaatcaagcatttcactcaactcaagacttgttgcttagacacacatttccagtcgtgtgcattccttagcttcctgcgtccctccatcgttcaaacaaaataaactagtacaggaatctcaacctgttggccatcgactacgcctttcggcctcgccttaggtcccgactaaccctgggaggacgagccttccccaggaaaccttagtcatacggtggatcagattctcactgatctttcgctactcatgccggcattctcacttctaagcgctccactagtccttacgatctagcttcatcgcccttagaacgctctcctaccgcggacacttacgtgtccacccacagtttcggtattatgtttagccccggtacattttcggcgcagcggcactcgactagtgagctattacgcactctttaaatggtggctgcttctgagccaacatcctagttgtctgtgcaccgccacatccttttccacttaacataaattttgggaccttaactggtgatctgggctgtttccctttcgactacggatcttatcactcgcagtctgactcccggaactaaatcaatggtattcggagtttatctgaattcagtaacccatgacgggcccctagtccaaacagtgctctacctccatgatccaatattccgaggctagccctaaagctatttcggagagaaccagctatctccaagttcgattggaatttcaccgctacccacacctcatccccgccattttcaactgacgtgggttcggtcctccagtgtgttttaccacaccttcaacctggacatgggtaggtcacttggtttcgggtctacatctatatactcactcgcccatttcagactcgctttcgctacggctccagcttttcactttaacctcgcatataaacgtaactcgccggttcattctacaaaaggcacgccatcactcattaacgagctttgactaattgtaggcacacggtttcaggatctatttcactccccttccggggtgcttttcacctttccctcacggtactggttcactatcggtcactagggagtatttagccttgggagatggtcctcccggattccgacggaatttcacgtgttccgccgtactcaggatccagaacggaggttaagttgtttaatctacgtggttatcacactctttgactcagcttcccagctgattcgattacaacttaacttggtaactccaatgttctgtcctacaaccccaagaagcaagcttcttggtttgggctcttccccgttcgctcgccgctacttagggaatcgatttttctttctcttcctgcaggtacttagatgtttcagttccccgcgtctaccttcattaagctatgtattcacttaatgataatacccgactaaaggtattgggttcccccattcggaaatctccggatcaaagcttacttacagctccccgaagcatatcggtgttagtaccgtccttcatcggctcctagtgccaaggcatccaccgtgcgccctttataacttaacctaactttacctacggtaaagggttattatttgagtttagcgatatgaactaattcatatttctattaaaaaactctttaaaacgcaatgttttctcggcttttaaaactaatatattacttattatccagttttcaaagaacaaagtttcgatgactattgtcatcaatggaggataacgggatcgaaccgatgacctcctgcgtgcaaagcaggcgctctcccagctgagctaatcccccgtgttggtactatttaattcttagtacaatgggcctaaatggactcgaaccatcgacctcacgcttatcaggcgtgcgctctaaccagctgagctataggcccaaaaaacgtcctaattcaatgagagtagacctctcaaaactaaacaaagtttcgacttcgcaaatgtacaaggttttccgtattattccttagaaaggaggtgatccagccgcaggttctcctacggctaccttgttacgacttcaccctaatcatctgtcccaccttagacggctggctcccgaaggttacctcaccggctttgggtgttacaaactctcatggtgtgacgggcggtgtgtacaaggcccgggaacgtattcaccgcggcatgctgatccgcgattactagcgattccggcttcatgtaggcgagttgcagcctacaatccgaactgagaatggttttaagagattagctaaacctcgcggtctcgcgactcgttgtaccatccattgtagcacgtgtgtagcccaggtcataaggggcatgatgatttgacgtcgtccccaccttcctccggtttgtcaccggcagtctcactagagtgcccaactaaatgctggcaactagtaataagggttgcgctcgttgcgggacttaacccaacatctcacgacacgagctgacgacaaccatgcaccacctgtcactttgtccccgaagggaaagccctatctctagagtggtcaaaggatgtcaagacctggtaaggttcttcgcgttgcttcgaattaaaccacatgctccaccgcttgtgcgggcccccgtcaattcctttgagtttcaaccttgcggtcgtactccccaggcggagtgcttaatgcgttagctgcggcactgaagggcggaaaccctccaacacctagcactcatcgtttacggcatggactaccagggtatctaatcctgtttgctacccatgctttcgagcctcagcgtcagttacagaccagacagccgccttcgccactggtgttcttccatatatctacgcatttcaccgctacacatggagttccactgtcctcttctgcactcaagttccccagtttccgatgcacttcttcggttgagccgaaggctttcacatcagacttaagaaaccgcctgcgctcgctttacgcccaataaatccggacaacgcttgccacctacgtattaccgcggctgctggcacgtagttagccgtggctttctggttggataccgtcactacctgatcagttactatcaaatacgttcttctccaacaacagagttttacgatccgaaaaccttcttcactcacgcggcgttgctccatcagactttcgtccattgtggaagattccctactgctgcctcccgtaggagtctgggccgtgtctcagtcccagtgtggccgattaccctctcaggtcggctatgcatcacggtcttggtgagcctttacctcaccaactaactaatgcaccgcgggtccatcctaaagtgatagccgaaaccatctttcaaccttgcaccatgcggtgctaggttttatgcggtattagcatctgtttccaaatgttatcccccactttagggcaggttacccacgtgttactcacccgtccgccactcactcaaatgttatcaatcagaagcaagcttcttcaatctaacgagagtgcgttcgacttgcatgtattaggcacgccgccagcgttcgtcctgagccaggatcaaactctcgattaaaagtttgtagctcttgttttgttacttaatttatttgctagcgaaattgactttgcaaatatgttttgtgccccgaagggcgaccctacacatttggtttgtcgaaactttgttcagttttcaaagatctactgtgttgaaacaacttaattaatatatcatttctaacgaacactgtcaagcgttttttataaatattttttgaatatttattcaatctcgtttgacccgttatttcgttagcaatgagcttttctctcgctgacaacatagaatactataccaacaatccaagacatcgtcaagcgattgtttactttttttgaataaaaatataaaaagtttcaaaagcgtacattgttgaatagatattcaccgattgtccgaactaattcaagtgcgggacactcgtgacttctaacttatccagtaattccgtgaactcactagggttcgcaaatcgaaaaccggcttcactaattattctcaattgttcggtataaaaatcagcctcatgagctccccactgaaagacaaagaacgaaacgttctcaccttcaaggttaatattcgctaaattgatcaatctcaattcgttaacatcaatatttagctgtgcttggattgcaattaatacagcagcaagtggtgtttgatcatcttgcttattggtcaccagcatcttataagaagcatcaacttgtggttggaccaaaaaatcatattgtccttgctctgtcttatacataatcgttccggctactttagcactcatacattctcacccttattcaagtcttctatcgcttcttcagtccatcttggtaatcgttctgcaatgggcgcaaacccaatatgaatccggcgatttgtccaatagtgtttcttagcacgctgtggtgctaaatcttgtgctttatgtagcgcacgtaacgacaaactaatcttatgtgtgtattcatcgatatctaacactaatacatctaacacttgaccgactttaaactgttcatctaacgctttaacaaaaccatgaccacattctgagatgtggattaagccttggaccgttgcatctaatgaaacaaatacaccatatggttgaatgcctgttacagtacctgtaatcttttgtccaattcgataacccatattttcctccatttcaatattcctatctattttaagccttccagttagtaaaaggcaagctatcggctaagaccttttatacaattccttctataatatgtaaaaagaacctgaggaaacatccctcaggttctcatttaactaaagttgatcagctgctagtaaaagtgccccagtaatcctagcgtcatcccctaatgcaacatgcacgatgtagtcatcaaggtcaggcgtttgcacataacctgccatttgacgtttaaaggattcacgaatcattgggaatagttgggcttgtttcgacaccccaccaccgaagacaattcgttctggcgatagcattaaagcaatatttacacaggcttgagctaaatagtcagcttccatttgccatgcttgatgatcagccggcaataagtggcctttcttgcccccaacggcgttcgattgctggaccagctgctaagccttccaaacaattgtggtgataaggacatgtcccttcgtatgaatcttctggttgttgccgaattaacatgtggccgatttcaggatggctgtaaccttgtaaaatctgaccgtgttcaacaacaccgccaccaatccccgtcccgacagttaagtaaacacaactatcaagtccatcagcagcgcccatcttcaattcaccataggctgcggcattcacatccgttgtaaaagcaaactgggtatcaggataatgagctttcattgctcctaagatatcatagtgttcccaccctgctttgggtgtatcgatgattgagccatatgtttttgatttcgggttaacatcaattgggccaaacgatgccaaaccaatggcatctaaatgatcgaattgatcaaaatattcaaataaccgtggcatcgtttgttccggcgtctcggttggcatactaattcgttcttgtatcccattttttccatctgttacggcacagacaaacttcgtgccccctccttcaattccacctactagcatctaaaacacctcttcaattaaaattaatgattaatcgtaatgtgattgatgataacttcttcaactggtttgtcttgcattcctgtttctgtagcgttgatcttattaacaacgtccatcccactcaagacgtgaccaaatacagtatgtttaaaatctaaccaaggtgtaccacccttttcataagccgtaatgacttcttctgggtaaccagcacctggcatttgtgacaacatgttttggttgatatgttcgtttgttacgatgaagaattggctgccgttcgtattaggaccagcattagccattgataatgcaccatttaagttaaagacttcttggttgaattcatcttcgaaaggttggccccagagactttcgccacccatcccagtaccggttggatcgccaccttgaatcatgaaatcgttgatgacccggtggaaaatcacaccgtcatagtaatctttttcagctaagccgataaagttttctactgtcttaggtgcttggtcttggaaaagtgctactgtaaattcgccacggtttgtgtcaaaagtagctgttggccctgcaaagtttgcaaggtctaattgtggatatgtcatttaatcgtcctccttgttttgactcacaatcattatgatagcgaattgcttcataaattactacgattatttcattaaacatgctttccttatttttttctagtatactaatttaagaaatctactattaaggaagttatctcatgcttgattcaaatcatctctttgatatcaccattattggcggcggtcctgtcggaatgtttgctgcctattatgctggtatgcgcaaggccgatgttcagattatcgaaagtctccccgaactcggtggtcaagtcgcaacactctatccagaaaagcaaatctatgatgtcgctggtttcagtggtatctctggtgcacagctcaccgaaaacttaattgaacagctggcacttttccaaccaaccttgcaattatccactgctgtgcaaggtatcgaaccccaagaagatgggactttcgttcttaaaacaacgaagggcacgacacgcaccaaaggcatcatcattgccgttgggaacggggctttcacaccgcggaaactcgctgtcgattacgatccagaatgggaaaatcactatattcactacttcgcaaaagaaatggcgcagttcaaagatcaaaccgttgccgttgctggcggtggtgattcggccattgaatgggcactaatgctcgaaaaagtggctaaacaagtctatttaattcaccgtcgggatcaattccgcgggcttgaaagtagcgttgaagcactcaaacaatcaactgtccaaattaagacgccgtttttaatcgatagtttgaccgaaatgaaccaacaactcgcattaactttaaataagatgaaatcaaccgatcaagagcagctaacaattgacaaactccttgttaactatgggtttatctctgatactcgaattctccgtgattggggattaacattggaccaccatcaagtcgctgttaaccaacaactcgagacgaacatcccgaacatctatgcgatcggcgatattgctacctaccctggtaaagtgaagttaattgccagcggatttggtgaagcaccaatggctgtgactgagttactaacgaatctctacccagaaaaacgccaaccactacacagcacgtccattatgtaagagtgcgcaatatgcccgattaccttctgaggattagcctagtccagtaaattagcgacgcagtcgatgatttactggccgtagctaaccggaagaaggtggcttatggagcacgtttcgataagagtgctttaactagcggttagcttctgagtatagcatcggttagtgaatgagccgcacagccgaccgtttgcaaaccgtggctaaacggaagaagttgctagctaaagcacgttttaaaaaagccctgcatcaacgttttaaccgttgatgcaggactttttagtattttattaagcattattttttttcatttgactcttaaccgctgtgataaccatcggaatcaatgagaccccgataatccctaacacaacgagtgagaaatgttcacgcacaacagcaatgtttccgaagaagtaaccagctccgcaacagagtgtcacccacaagatactcccaatcacgtcgtaacggaagaacttcatgaaggccatctggctcccaccggcaacaaatggaacgaatgttctaataatcggcatgaaacggccaattgcaatggttttaccaccatacttatcaaagaagacctgcgcctcttcaattttctcggtattgataaacttgccgaagaaccgattcttcgtggcggctaaaccgacccgttggccaatttgttcattcaatgaatcacccgcaattgaggcgattaagaacaaggcagcaaacagccagacattcaagtcattatcagtccgggctgccaaagcagcagcggcaaataaaagcgagtcccccggtagaaacggtaagataaccgccccggtttcaacaaagataatggcaaacaagatgacataggtccagttgccgaactgattaacaatgttgaccaggtgggcatcaatatgtaaaacaaaatcaattaactgcgtcatgcgatttctcctatactctttttcaatttaaaaatatatcccttattaggataccgaatccatgcatcaaagcaatcacttttgcattttcttaataaaaagccaaacgttatagcgcacgtttaccgcgccataacagccaagcaaaactaccctctaacaaaatgaagaagagtgcaaaacaaaggccaaaatagacttccggtaacactaagataatcggatcagtgattggatcaaactgccagttcagattgcgaaacaataattcgtggaacgtaatgaaaaaccgatcgaaattcatactagcaataaaccctaatatgggtggcaccacaagagcaacttgcattgggcggacgtattgccaaacccgattggtcttgcgccgactccgccaatgctgaatcgccgctccaatcgttactagccaaataactactgctaaaccaaacaagcgtttcacttcaacaaaatgttgccgaccatccaatgacattggaaagtcaggtagttgtaagcgtggttgccatggcacaagtaagtagcccattaaccggttaaagttcatcatcagccgcggttgcgttaattcccgttgactcgctagatcgaggtagtgactcactagcggataaagtgcccagcttaacaataacgttattaaaatcgcactgctgactaacgccaaatacaacgccgcccaactagtggtacttctaacccgctttaaacgtcccattcggttaagtcgttaatgatatgcgttggttgcaaggcttcttttgccacatcctctggcgttgaaacaccagtgtaaactaacaacgtatccatccctgcattcaagccagccttgatatctgtattgtagttatcgccaaccatcaccacttgttccttcgtcaagccgaattgctctaaggccatttccataatgattttttcaggcttaccgatatagagtgcactttgttgcgttgcccgttcaaccatcgcaatcactgaaccagcacctggcactagcccgcgttcgtttggtaaattcgtatccgcattggtgccgatgaataatgcaccgcgcttaatcgctaacgttgctaattcaaacttgtgataagtcacatcataatccaaaccaactaccacgtagtctggatcgaattcattggttctaaaaccggcatctgatagagcctgcttcaaaccgagttctccaatcacgtagaccgttttgccattcgctgtaccaccgtttaaattcaatagatagcgcgccgttgccaaagaaggggtatacacttggtcaactgtcgcatgaatgtcatggttatccgccaaattctgaatcacagcagctggtgatttcgtagtgttgttcgtcaaaaacatgaacggaatttgttttgcttgtaggcgttcaatgaaatctttggcttctggcatccgatcacggccgcgatacacggtgccgtctaaatcaattaaataccctgcataatctgtgtttgtcatagttgtctaactccaattacgttttactttttattgtgttccaaaggacggatcttaaaatgacgcttattaactgatttttgattctcggttaccgccttttgagggcgttctttagtcactttttgcttgttatcggtgactttccgttctgtaaaacctggcttttgacgccgacgccgttgctgaccacgttggcgattactccgccgattctcattcttaatgattggcttgccttgacgttccaaaacaaagtaggcacaaccaaagttgcagtattcgtatagataatcttgtaacgtattgattaattgatctttattagcgcgtttgttggttgctttgtaaaagcccttcaaacgcagttgttcaaagccccagtcagccacaatataatcgtacttagccaacacttcattatagcgttcgttcaacttttcagcgtcgaagccttcacgatagttcacaacgacttcataagcacatttatcaatctcaagcgtggtttcagtcttcatgacaacgtgttgtggcacttccggttgtttggctgaagcgatcatttctttttcaatcgccttggtcactttcttggcaatcttgggactgtttttcgtatccgccacagcgaacctcctcttcccttataagggataatgtttacttaaatatttagcgaccgcgtctctgagaaaatcagggaacacgatctcggtctcgccaacaatctcaattgttggaaagaatggaatgaatagataatgatcgacggtcgtcaacgtatagctggcttctggatcaatttcttgcccatgccaaaagacgcgccgcaatttcatatcaaccgctatcccgtcataaacgatgtctccaaagattttaccacggaaactcatccctttaataggaaacttgcgtaaaaagagccggtttttctccatttcaagcaccatccgccacaaatcataccctttgagcgtcactttaatcagatgcattggatgcggtaattgagtttgcaaatcatctttagtaacaatcccagcctgcaaatcttgcaagaacaagccagtattcaatacggcagcttcagtgctggtcgcttcttcaattgcctttaaaccggtcgtcatcatttctgattcaccaattgcgttgattttaaaagcgtgtggcaacttggcaacatgctcggcggctaattgtgcgtgcccctttttcaggtagccttcaatttctgctgcgtcagtcttcacaactggtaagtccgcggttaaaaccgtccgagcacttttatgcatcacatggtgctgatcatccagttcaagcgtgatatcaccaaggtaatgaccgtacttctcggcagccgtcaataaggtttgattaaccagcagcccctcttctaaaagatgatgcgtgtgcgcaccacagacgacatcaatctcagggaattgttccgccagccacttatcagtcgtaatcccaagatgtgataggacgattaagatgtcatattgaccttcaatcgccgctaattgccgcggcaactcttcactgacagtcgtcggttcccaaccattcggccgataagttaagaaaaatggtgcggtcaaggcaataattgctacccgcgttccagcatcggtcgtcattagtcggtaagattgcgcaaatgctggcctttcgtttgttgcttgttcatacagattagccagtaataccgggaaattcgccttatcatacaaatgttccagatcagcatgactattaccgattccttcattgtttccaatcgttactccgtcatacccaatttgattgagtaactcggtattaatctgaccattcgttgcttcagtcaatggatgactacgatccattgcatccccgatgtcgaaggtcaagaccgtatccccttgctttcggtatgctgcttgatgttctaagaggaagcgccgcattctgggccaattttcaaaatgtgaatgtaagtcattcgtgtgtaaaatatgaattgtttccattttgcttactcccttcagctagtcgtggctggggtttgccagcgcggcttgtttgcgttcaaaaatgatttcaatctcatttgccgcaaggggtgttccaaacggcacccgttcaggtaataattcgcgctctggtgcatcaatcccgacattgatattctctgcaatcggcaacatataatgatgaatatgtccgtgcaagttgaacgtctgttggacctttcccaataataacggatagtgggttaaaaaatactgatggtgattgatcttaattagctcaccgacatcagcaaattgataatgcgccttgccagctgataatcccgcatcatgtttcgccaaatatttcaaaaaagcacggttatcatgattacctttaataataatcagctgcccattcaactgctctaacacagcagcgacttcggcaaaagcactcggcttattgggcaccattgcgacgtcacccaacaaataaacctggtcgtcagcttgcacccgttgattccagttagcaataatcgttgcattcatcgtagctacatctttaaacggacgcggcgcaaaatcattattacctaataattcggcgtgaaaaaaatgcgtatccgctgtgaaataaatcattcacaatcccacctaaccaatatgatttgcttttaaaatctcctgaaaggcttgcgcaactgcgccgtcttctttttcccattcttcccagtggtcaaaatcaaccgcaggcattgtgtaacgttcattaatgtaagcttcgtaagtttggaccgcattcgaatgcggaatgttgagttgtaaaatccggacttgcttaataaatccccggttagccgctagttcggcacgcccattcataaagatgttagccaattcataatacgttgtgccatctaagcgcgtaatttcttcaataatatcaaatgtttggtacttctccgccattgtgttacttcctattctaatccgatttcagttacgtttattctaccaatatgtacacaaaaaaaccactacccgcagatagtggttggcataagagagaaagagaattgataaaaaggtaattgcataagtaccttacaaacataatataccgcctaatgtaagcgttgtcaattgttatttttaatttatttatccgtttctttaaagttctgtaacaatcgtaggcatttgaaaggaataatggtatcttaaaaagagtagtttttatcaattgaggaggccattgatttgtcacagcaacattcacgatgggggcttttagtattaacaagcctttgtttctggtttttaaccggttttaccgttgtcgctcatcgtggcgaccccatcaacgcacccgaagaaacatttcaaagtatcgacatggccttttcgcaaggcgctaactatgtcgaactcgatttacacgaatctcaagatggcgtcttagtcatctcccacgaccgtaacttacaacgcgtcacggggaccgatgcgattgtttcgcaaaatacttttgccaagctcagtgaactcaaaatgagtaacggggaaccaccacacagcgtcgatcaattatttgagcactatcaaaacaacccaaatgcgaaattcctcatcgaaaccaagaaaaccaaaaagggaaatccgcaggacatggaagcaaaactcgtggcgctgattcaacaatatcacatgcaagaccgcgttatggtccattccttttccctcgctagtctgcaaaacatgcaacgtttaatgccagagattccccgcatttttatcgttggcagtttacagcggatctcattcgagagttttaaatacgccgacgggattaacatctcatcatccctcgtcaccccaaccatcattaaacagctccattatctccatcaaaaagtgtatgtctggaatgagatgtctgaaaaccaagcgacttggaactggttagtcaacctaaatgtcgacggcgtggtcacgaactatccggcactgggacgccactatcaggccgcacaggatcaagcagaaagtgaagccatcgacacaattgggcaagtcaatgacgttcaagacctccccaccgttgaaaatccatatgaaccaaccctcaataaaaagccggctaaagcgggccatatctacaacatcaccgaagccgttacaattgccgatcaaacttactaccgcattggcactaaccgctttgtcctcagcgacagcatcaacgtcggtgaaacagcgaaagccgctgctttattggtgggtaaaacggcgcagattaaaccaactgcgaacattgtcgctacttggaataatccgctacaccccacccagacaaccgcttatcttagtgccaattcacaacagcaaattttaggagtgcgctatgttggtaatcaagtctggttgaaagtcgctagtggttggttcaagagtcgccaagcattaatcgacttcaacccaaaccaatcgctgatggtaacccacttttaccgtgaaattccccaacaattgcggccaaccaacttactgattaacccagcactgccactgcaattgccccaacaaccaccagtcgacgcgcaactgtttaaccagtttgcccgttctctacaactaactaccattaaattctaacgaggtcaccttttatgacatccgattatgaacaattgattcgttccgtccaaaatactcttccaaaggaagaaacacttgatcacatctcaattctttttaaaatactaggcgataaaacacgcgctaaaatcttgtacgccctctttcaatccgaattgcgggtgagcgatattgtcagtgtgttagagatgtcgcaatcctcaatttcacatcaattacgtgcactcaagcaagcgaaactggtaaaaagtcgtaaagaaggcaaggaagttttctattcattagctgacaaccatgtcatcaatatcttttcgcaagttatcgcccacgtcaacgaacactaaggatcctattgacaccgatcaaattcactttggtcggtgctttttttaatgtcccaaacccatcatctcgattgcattctatcgtgtttggtggtatcttatagtcaacgtatgaatatatgctcatatgtttgtttatttagtaaagattacgatttagcttttcactcaacaaggaggcctaaataacatggcacaacttcaattaaccggcatcgattgtgccgcatgtgcgactaaaattgaaaagaacgttaacaagatggccaacgttaaaagttgctccgtcaatttcaccactcaaaaattaaactatgaactcaccggccaagaagctgttacggaattcgaacaacaactcgctactcttttgccaaccattgaaccagatgtggggattcagcaatcaccaaccccagaaccatcccccgcaaaacatgcgattaattatgatctcatccgaattctcgtcagctctttaggcttggcgatttcttatcttgtcgctctaagcgcgccagctaaaaccacgttgctcctagctgcctttgtagtcatcggctacgatatcgtctggaccgcaatcaaaaatattctccatggcgaatggttcgatgaacatttcttaatgtcaattgcaaccattggggcctttggaatcggacaatatgccgaagccgttggtgtcatgttattctatcaagtcggtgaatatttccaatcattagcggtcaatcattcccggcgctcaattgctaacttagtggcaattaaaccaaccatcgccaatcggttagcggctgatggcaccaccgaagttgttgcacccgaagcaattcaggttggcgaacacatcgtggtgaaaccaggggaaaaagtcccgctcgacggtgtgattactaccggcgacagttacgtggacacctcagctattaccggtgaatctgttcctcgcgcctttcatcctggtgatgaactactcagtgggacgattaaccaatcaggtttattaacgcttgaagtcacgaaaccttatgctgattcaaccatcgctaagattttagaccttgtcgaaaatgcaagcagtcaaaaagcgcctactgaaaacttcatcacgcggtttgccaaagtctacacaccaattgttgtcggcattgcagccatcatggccattgtaccgccccttttattcggtgctccatttggcgattggctctatcgggcattgattttcttagtgatttcttgtccatgtgccctcgtcatttcaattccactcggctttttcgctgggattggaacggcttctaaaaacggcatcctggttaaagggagtaattatctcgaagctttaaacgatgtccaaaccgttgttttcgacaagactgggacattgacccaaggtagtttcagcgtcaccaccgttcattcggtcgatcaacaacctgatgaacttttagcactagctgcccttgtcgaacaacactcgacccatccaattggtcaatcgattttagcagctaaccaaacgccactcacaaagacattatctgacgtccaagaaaccgctggtcacgggattagcgggcaactcaacggacaacttttacaagctggtaaggctagttggttacaagccagtggcatcgcaacactcacacctagtgaagtgggcaccagtgtccatgttgcttacaacaaccgctacttggggtatatcgtcattgcggacaccgtcaaaccagatgcacaaacggctgtcgcgcagctaaaacacgccgggattcatcaaacaattatgttgactggcgataaccaacccgttgcgcaacaagtcagcgccgtcttaggtatcgataagtatcaaagcgaacttctgccgcaagataaagtggccgccgtcgccaaactcacagaagaccgcgctaccaacggaaaaatcgtctttgttggtgacggaatcaacgacacgcccgttttagcccgtgccgacgtgggcgttgcgatgggcgggttaggttctgacgccgctattgaagctgccgatatcgtcttgatgtccgatgaaccgacaaaattagcaactgcgatttcgatcgccaagtacacccgccgcatcgtttggcaaaacatcattttcgcattagtggtcaaaggcatcttcttattattaggcgcctttggaattgccacaatgtgggaagccgttttcgccgatgtcggggtaacgttaatcgcgattttaaacgcacttcggattttaaagaagcactaaccttaaagggttcatggagactttgtgaaccttttattttttaatggcaagcgctttttaaatctgtaataatatgctaaaatgtgaatagattaataattaattaaccgttttttggttaaaatttaacaatgaaagttgggactgcaatgacattgaattggcaacaagaagcagcaaagtataaggatcaaatgcttgctgacttaacaagtttactcaagattaatagtgcgcgcgacgttgaccataaagaagacgacgcaccacttggccctggcccccgcgatgccttgctacaattcttagcaatcgctgaccgcgacggttttacaacaaagaatgttgaaaacgttgcaggtcgcattgaactcggtagtggcgacgaaatattcgggattttaggtcacatggacgttgtgcctgccggtgacggttgggaaacaaacccatttgaaccagtgatcaaagacggtaagatttatgcccgcggttcatcagatgataaggggccttcaatcgcagcatattatgctttgaaattattaaaagacaacggtatcgaattaaacaaaaaagtgcactttatcgttgggactgacgaagaaagtgaatgggttgggatcaaccgttacctcgaagttgaaccaaaacctgactttgcaatttcgccagatgcaaacttcccaatcatcaatggtgaaaaagggattgtgtcatacctcatgactttcaaaccagttgacggtgctgatggcgatatgacattggttagcttcaaatctggtttacgcgccaacatggtgccacaaacagctaaagccatcttaacgggtgcaatgccagctgatttccaagctaagtttgacgcctatgttgccgaccacaagttacaagggacaatcacaactgacggtgaccaaacaatcatcgacttaatcggtaaaggttcacatgctcaagaaccaaaagccggcgtaaatgctgcaacacacttggcaactttcttagctgactttgccttagatactaaaggtggcaactacatcggaacaattgcccgcttaatgcacgaagattcacgtgggcacctcttaaacatcaaccacacagatgatgtgatgggcgacttaacagcatgtcctgcagtcttcaactacacacaagatggtgtagcaacagtgctcttgaacgtccgttatcctaaaggtgtgactgctgaaagcacacgcgacgatttagcaaacacacttagtgatcttgctgacgtaacaattgacggtcatgcacaagaaccacattacgtgcctggtgacgatccattggttgcaacattattaagcgtcttcgaagaacaaactggtcttaaaggtcacgaacaagttatcggtggtggcacatatggtcgtatcttagaacgtggtgttgctttcggtgccttaccagaagaacgcgaaaatgtgatgcatcaagcaaatgaatatatgcacattgaagatatcatgaatgccatcgcaatctatgcagatgcaatttacagattaacaaggtagagtgtgacgtaagtcgggtatccaccgaggattaatacaaagttgtgaatgattgcgtagcaatcgtttgcggctcagggttaaccggaaggatatggctgatagaacacatttagcaatcaaaaaaacggtccaaagcttaatcgctttggaccgtttttttgattgccttcatttatcagcaggcatcagcttaaacgttgaatgcccatctttgacaattgcgtataagatttgttgctttgtttcatcgaagtaaccgagattaacagccatttcgccatcaatctcttcaatcccctcaaaatgttcccgaattatcgaacgaacaaccttcatgttatccatgtgtttttgaattttctgtacagcaacccctagcgtgtagccttcatctaagaaatgcttgataaagatcgccttaatcattgtttgcgcgtcgtactcgcgggccttattgccatccaattcacgcgctttaatgtatcctttttgctcccagtagcggagttgacgcggtgtaacccccgccattttacaaacttcactaatcccaaaaatcaatcgatccgtatctattaactttaaaaaaaggtctttttgcaagtccccactccattcctattattatttttcattatagataatctgttgggattgtcaagttaaataacacctttgtcaactcacttgacaaagataccaaatgcgtctaaactaataaatcgcatcaacaaaaacacacaaaggagatttttatcttgtcagacgctagaccattagatattcatgggaaaccatataatcggacagtcttagtcttggtcttattgattggtactttctgtaccgtcttgaaccagacgattttatcaactgctttccccacattaatgaaagcattcgatgtgtccacctcagccgttcaatggctcacaaccggtttcttactagtcaacgggattatgatccccattagtgcttggttaattaaccgattcaattcaaaagtcctctacatgtcagcaatgactgtcttcttaatcgggactattatctgttacatcgcaccaacgagctcatttgcaactctattaatcggccggcttgttcaagctgctggtgttgggatttcaatgcccattttgcaaaccattatgctcaccatcttcccacctgaaaaacggggaacagccatggggatggccgggattgttatcggcctggcacctgctttagggcctaccctttcaggctggattatcgattcatacaactggcgtgttttattcggcatgattattccaatcgtgattctcgtcttagtcctcgctagtttccaaatgaagagtgttattcaactttcaaaacctaaaattgatgtcccttcaattattttatcaactgtcggcttcgggagcttgctttatggcttctcagaagttggcgataaaggctggggcgatgcgctcgttctcacaaccttagcaattggcgttgtggtaattgctttattcatctggcgccaactcacgatggaaaacccattcttggaactccgcgttttcaaatcacctgtcttcacaattgctgctattttaagtggtgtgacgaacatggcgatggtcggtgccgaaatggtcttgccactatacattcaaaacattcgtggcgaatctgccttccattcaggcttaacgttattagctggttccctcatgatggggattatgatgccaattacgggccgtatttttgataaatatggtgccaaacgcttagcaatgaccgggatgttcttatttattgatggctgcaactgcgccattcatcttcctaacagctactaccccaatcatctacatcgttgtgttatacgctgtccggatgtttgggatttcaatggtgatgatgcctgtcacaacttccggaatgaacgctttaccaatgaacttaattagtcatgggacagctgttaataatactttccgccaagttgccagctcaatcgggacagccatcttaatcagtgtgctttctagtgttacaaaaggcaatatgccaagcacacacatggtcaagacattaccattggccttccgcgataagatgattgatgccaccctttctggttatcacgcagccttcatcgttgctgtgattttctgtgtgattggcttcatcatcacattcttcctctcttcaaagaaatctacgattaatgggggtgccaaggcatgatcgtcattacactcgttatcagcacactcgcattattcttttcatcgattttcggtcaaaagatgtggcgaccaatcttaatgaccctctttggactcacatttatcgcttcactcgttttcatcgtccaaaatgatcacaatcattacggaatgaaaactgtgaccgaaactaagacgcacacgctcgtttcaagcgcagatgcgaagggcatgtcaatgcttctctatcacccgcttggtaacggcactgaaaaagtctatctttatcggaccgatgccaaccaaagtaaacccaaagcaacccaaactgaaaagacaaccaacagtgttcaaaaaaatgctgataaagcagtcttagtgacaaccaccaaataccgcgttcatcaaaataatacggctaaattctggttcggaatttctggtaacgaccacgaattcgtaagtcgtcacaacacatttaaggttgctaaaggctggttcgttctaagtgatgttcaagctaaacaactcgctaaaacattaaaaggtcaacaagcacaacttaaaactggcgcagaaaatgccggtaaacaagctgtgatggctgctatgcaagccaatccagcaatgactgctgatcaacaacaagcggttgctaaaaaagcagcaatcgcctatcaacaagccgcaatggctaaagtgatggcaacattgaaataatgcaatcaaaaaatcccccacatcgtgatttgatgttgaagtgaacccttaaaattggacaaattgttaagctgctttttgaacggcgagttctcggtattttaccgggggcttgccgtttaattttgttttgatacgacggttgttatagaagtctatccaatctttcattgcttgaattaggctagttttatcttcaaaatgttcatccatcatttctgctttcataatatgaaagaatgactccattactgcattatcaaggcaagtcgctttacgagacatactttggaatgcatgatgttctttcaagagcgttcgccattggcgatgttgatactgaaagccttggtcagtatgaactgttgtccgataatttagtgccggaagtccttctaaagcttctttgagcggtttaatggcgaattcaactgttggatgttcacttatattaaatgctaaaatttctccagagaataaatctagtaccggttccaaataaacgcgttcatttgttcccatagatccatatcgaaattcactgacgtctgctacaagtttttgatagggtctgtcggtcttaaagcgacgctttaaccgattaggggcaatcctaccaactaatcctttatacgagttatatttacgagtttggcgattaaaggcatgacatatccaggcatgttcttgcataatacgtaaaacccgcttgtgatttatctgaaatcctaaatcatgcagagcacttgtaattcgacggtacccgtacttctttgtgtattttaaatcttgttgtcgaatttcatcaattgcttgaataacttgatcgtcattgaattttcgaccttcatgatttcgagtgtagtaatacgtgctacgcggtattttaattactttgagaatcaatttaattgatacttggaatatttgcctcaactcagtcgctattttcgagatttcctttgtgctgattttttccgagctaaggcttctaatttttttaagtattcattctcaatcttcaacatttgattctctttttggagttgctttaaagtatcttttgttgttgagttgtccttttggacaactggtttagcgttctcattcttgtgttttgccatatttttcgagttgcctcgctttcgctcaagcccttcaattcctaatgtctcaaatcgcttttcccattgccaaattgtacttggcgaggataaattaaagtgtaaggcggttactggaagtgaggcctgattttgtttcctccagtttaatacatcaactttaaactgactagtgtattctaagtccatggcttttggctgaagtcctttaataccaaatctttcaaaccgctgaatccaaattgaaacggtagccttgctgccaatcccatactttctcgctagtgaataagctgcctgaccacttaaatactcggtgacaatcttaactttaaaatcgaaattaaatttactcataaatgaaacccccaaaattggatttttctgtccaaccttgggggttcactttaatgtgggggatttttttatggtggaaatgtgctccgtcatccatatccttgcggttaaccctgaatgtcaaacgattgctgacgcaatcattcgccatcctgtgttaatcctcgggatatacccggctggctacgcactctgttttgaaacgtgctttttgaaacatcttcctgcgcttaaccaaatttggcaaatcgacgatttcatcgtcaattcgtcaaatccagttaatgctcagaagatacccgtttcaaacgcactcttattttgaaacgggctccatcaggcatactcttccggttagttacatatcgaaaacgatcggctttgccgctcattcacgatatgccactaatcctcagagcataaccgcctgctgtcgcactctatttgcttaacaagcttgctgctgcttcgtctacgatgattgtcacgtcgtcgtgtagttgtaatgcacttgctgggacgtctgttgtttgtgggccttctactgtgcctttgatggcttcagcttttgatttgccatatgcgaacaagacgattttcttagcttttaagattgagccaatccccattgagattgcttttgttggtacatctgcttcattttcgaagaaacgtgcgttagctttaattgttgattctgttaattgcacttcttgtgtattgctgtcaaacgcagcaccgggttcattgaagccgatgtgaccgttttggccgatccctaagatttggatatcaactgggttatcagcaatcacttggtcatagcgttttaattcagcagaaatgtcgcttgctaagccgtttggtaagtatgatttagtaaatggtttcttgtcgaataagttcttcttcatgaaatagtggtaactttggtcgtcatcagctgataagccaacatattcgtccaagttcacggatgtgcaacctgtgaaatctaagtcgctagccactaatgtttcgtagaatttaattggtgaactaccagttgccaaaccgaatactttagcgttgtttgctaaaccttctttgaagatttcaaagcttttttggccgccttctacttgatctttcactttaataattttcatcatgattatctcctcatcctttaaaaattcaagtcgttcattggtatagtccaattataaacggctaaaatttcaattgcaagccttttgacgctaaaaaacgcgctaaataattggtatacctaacgtttagcgttttcacggtatttcgttaaaagcttacttttaatcgctagcaaacgcccccctttttgtgtctgctgattcaaattggttaaccaattgcactatattcattgattgccgtgcatttctggatatttttcatttgtcttacaaatccgaaatcgggtatgataatgcgctgaactattatataatatgggacagtatgagaaaaaaggtggcgttattatttgaatgatccaaagcaccgttccagtcgatggcgagcactgctccagtcgagcagacaaaaggtctcaacgctattgacatctgctaaagacagactcgcacatttgctccatttacccgataaacgttctgcacaaccaactaaggaacaaaaaagagcctacatccaagagttgagccaatcaccactctcttttaagattaacgtcttctttgaagccattaagagtatttttctctatgggatctcaattggcttaatctgtatggcgctcgctgctggaattggcgcgggctattttgctgcgttaatgaaatccgaaccaattcctagttatcaagtgctaaagcaacaacttgataataccgatcaagcagccggtttatactttgccaagaacaataagttcggcgcaatcaaaaccgacttaattcggactcccatcaacatccatgagatgtccccttatctaaaggatgcgattgttgcaaccgaagatgaggatttctataaacacgatggggttgtccccaaagcactcttgcgggccgttatttccgatgtcactgggtttggttcacaaaccggtggctcgactttaacgcaacaattgattaagatgcaggttttaacctcccaagtaacctttaaacggaaagcaaccgaagtcttgctcgccttgcgggtcgataagtatttcactaaaaaagaaatcttacaagactacttaaacgttgccactcttggccgtaacaataaaggacaaaatatcgctggtgttcaagaagcagcattgggcctattcggcaaaaatgctaaggatctttctctagccgaggctgcctacattgctggtctgccacagagtccttccgtctatacaccatatgatcaagacggcacccttaaagatcctgaatacttaaaatatggtctagatcgtaaaaataccgtgttattccggatgtatcgtgacaatcgcattacaaaggctgaatacaaagccgctaagaaagtcgacttaaccaaagaattccaaccaaaagccgatccagccgaaacaacgaagagttatggctatgtttataacttacttgaaacacaagcaactgatattatggccaaacagttagccaaagaagccaatgtttcaactgccaaacttaacaaagatccaaatctctacaaacaatatgaaacacaagcaactgaattactcagcactaaaggctatcaaattcacagtactatcgatcaagaaatttacgatgccatgcaaggggttgttcaccaacagggcgcaacattcggacggacttataccgataccgttactgacgaagaaacggggttacaaaagaccgtttcgtcccctgttcaaaacgggagcgtcttgttagataaccgcactgggaaagtgatttcttttgtcggcggacgtgatttctcactcaaacaaacaaactacatgttgaccaaacgttctcctggttcaactatcaagccattgttagtctatggtccagcaatcgatcagaaactgattggttctaaaacgatgttggccgatttcaagaccaacttcaaggattacgcaccaaccgattacggtggcacgatccagaacaaattcattccagctgacgaagcgttagcccagtcattgaatattccaaccgttaacctttataacgctttgaagaacacaacagatccttctaagtacatgagtaagatgggcatcaacctcaccgctgatgaatacagtcaactggggatttcacttggtgggaccagtgatggggtcagcgtcttagaacaggccagtgcattttcaaccttcgcggatcaaggtgaacataccgacgcctacgtgattgaaaagattacggatcccgccggtaatgtcgtttaccaacatcacgctaagaagaaacgcgtcttttcaaaagcaacgtcgtacatcatgaaccaaatgttagccggcgttttaacagatgggactgctacttcaatttacgatcaactctactttaataccaacaacttagttgggaaaactgggacttcaaatgataaccgcgatatctggtttatcgggagtacccctgggatcaccctcgcttcatggatgggttatgacagtactggtcgtaacttaactgacaactcaagccagattaatgaaagatactggtcaaaattggccaacagcgtttatcagatcaacccaagcctcatgcgtttggaagatgatcatgaaaagccaagtacggtcacaagcagcaaagtcttgaaattaactggtcaattacctggcacggtttcaatcaacggcagctcacagaacttgaacggttcaaccgtcacctcgctttataacaactggacgccaaaagcaactagctatgaattcgggattggcggttctgcccggaactacgaaactttctggaaccactatttaggttataacaacggctatggttcaattacctatagcaccgctgatgaattaaatccaactagtggctacagtagtcgtcgcagtggcaccgcagcaacaacgacaaataattacacagcaaacacaactggtactgctgctacgactggcactacaaccggtacgaattatacagcgaataccaatccaacagatacagagacaacgaactaaactaaaaaaaggcctcagttctaacgatttaaaatcgtttggaactgaggccttttttgattggtggaaacgtgctcttgtttgcaacaacttccgcttaatctaaaaatcccgttaatcctaaaacctggattaacgggatttttttattaatgctcaattgctgaccgcaaccaatagcactctattttgttgattctcttgctacgatactgtatggcaataggattgtcttgtcgtttacgtcttctttgttcatcatctttgttaaaagccgcattgctacggcacccatatcatacaatggttgtgagattgacgtcatcttaggacgtaccatttcagttaacttcgtgttgttacttgtcacaacttcgaattcagctgggatttgaacgccggcatcaactgccccgttcaagacaccaactgccaattcgtcatcactgacaacagcagctgttgccccagttgctttgattttgctgaacaatgcttcaccagcactgtagctgtattctgtttcaaaaattaaactttcgtcataagcaatgcctgcttcattcaaggcatccttgtaaccgcataaacgatacttgctgttaattgggaatttcaagctaccacaaacgaacgccactttgtcatgaccatttttgattaacttcaaagttgcatctttaacagcggcaacgtaatcgatgttaacactacccacttgttcgtctggatcaattgaaccagctaacacgattggtgtctttgaacgtgagaattcagcgcggatttcgtctgaaatactgtggcccatgtagattaaaccgtcaacttgttttgccaataaggtattcaacacttgaacttccttttggttgttttcatctgagttagccaaaataatgttgtacttgtacattgtcgcaacatcgtcaatcccacgagcaagtgatgcaaaatagatgtcactaacgtcgggaatgatgaccccaaccgttgttgtcttcttgcttgctaatccacgggccaccgcatttggacggtagtcaagacggttaataacttcaagaaccttcttacgtgttgcgggtttcacattcgggttaccattgacaactcgtgagacagttgccattgaaacgtcggcttcgcgcgcaacgtcataaattgtaattgtttgtttttccatgattaaatgattcctttcatttgtaaaataaaatagattatattttcagcagttttcattttacttcttgattaatttaacagagatttaaagcaaatgcaagcggtttacactaattttcatgaaatttacatttttgttttcatttgtggtttacattaccgtttacattggttgtgatatactagtgatatcaattgtaaaggaagtgctttagatgaataatcaattagcccaattacaaaattggcttggtgagaataatatggatgtggcttacatcagtaatccaaccaacatcctctatttcactggtttcgaaagtgatcctgcagaacgggtcttagccctctttgtttttgcagatcaggacccattcctatttacaccacaattagaagttgaatctgctaaaaaagctggctggaaactcgacgtttacggctatctcgatcacgaagatccatacgcaatcatcgcagatcaaatcaagaaacggaatgcgaaccctacacgttgggcacttgaaaaagacgaccttcctgttcaacgttacgaagctattctaaagcaattcccagacgcaacattcccaggcgacgcttcacgtttcatggaaaacttaaaattaattaaaacacctgaagaaatcgctttaatggaagcagccggccgtgaagccgattatgctttcgaagttggtttcaatgccttaaaagcaggtaaaacagaacaagatatcgttgcagaaatcgaatacgcattaatgcgcaaaggcgttatgcatatgagttttgataccatcgtacaatcaggtatcaacgcagctaacccccatggtggccccgaagccaacattttaaccccagatgccctcgtgctctttgaccttgggacattgcataagggttacatgagtgatgcgacgcggaccgttgcttttggcaaacctgatgcgaaatcactcgaaatccacaaagtctgtcttgaagcaaacttaactgcccaagcagcaatcaaacccggtatcacagcggctgaattagataagattgcacgtgacgtcatcactaaagcgggctacggcgaatacttcatccaccgtctaggtcacggcattggaacttcagaacacgaattcccatcaatcatggaaggcaacgacatgattatcaagccaggcatgtgtttctcaatcgaaccaggaatctacatcccaggcgttgccggtgttcgaattgaagactgtgtccacgtaacagaaacaggatcagaagccttcacacacatgacaaaagaactacaaacattctaagagtgctgattcaaacgggttggctttgaggattaacttaaaaacgcggattatgacgcttttcgtcatgattcgcgttttttggttaaccggaaaaggcagtttgaaacagcacgtttcaataagagtgcccttaattgcggtcagcaactgagcactaattaaaaaaggcagacgaaatcacaaaatgatttcgtctgccttttgttttaaagaactttataatccctagtcgttaaccattcaaactatgttacagtaatcctaacagtaagtttatgacggtggctaacgctcagaaatgaggtgatgcctatgttgattaagcgttaccttgagaaaggataacatgtcggttttcaacgcactgatgttggcaatttcggttgccatgttagtcattgagattctgaaatttaatcaaaaaaaataaccgtctaaactttgacgagtcacggttattttttaccaaaaacttgccaccgtcttaagcggactgtggagaagagtcgtgttgtcgcacggctctttttctatgttttcattataacaccgacttttaaaatttgcaccagtcgtcaattcaaacaagcaaaaaagcccccgctatgaagtgaacccttaaaattggacaaattgttaagctgctttttgaacggcgagttctcggtattttaccgggggcttgccgtttaattttgttttgatacgacggttgttatagaagtctatccaatctttcattgcttgaattaggctagttttatcttcaaaatgttcatccatcatttctgctttcataatatgaaagaatgactccattactgcattatcaaggcaagtcgctttacgagacatactttggaatgcatgatgttctttcaagagcgttcgccattggcgatgttgatactgaaagccttggtcagtatgaactgttgtccgataatttagtgccggaagtccttctagagcttctttgagcggtttaatagcgaattcaactgttggatgttcacttatattaaatgctaaaatttctccagagaataaatctagtaccggttccaaataaacgcgttcatttgttcccatagatccatatcgaaattcactgacgtctgctacaagtttttgatagggtctgtcggtcttaaagcgacgctttaaccgattaggggcaatcctaccaactaatcctttatacgagttatatttacgagtttggcgattaaaggcatgacatatccaggcatgttcttgcataatacgtaaaacccgcttgtgatttatctgaaatcctaaatcatgcagagcacttgtaattcgacggtacccgtacttctttgtgtattttaaatcttgttgtcgaatttcatcaattgcttgaataacttgatcgtcattgaattttcgaccttcatgatttcgagtgtagtaatacgtgctacgcggtattttaattactttgagaatcaatttaattgatacttggaatatttgcctcaactcagtcgctattttcgagatttcctttgtgctgattttttccgagctaaggcttctaatttttttaagtattcattctcaatcttcaacatttgattctctttttggagttgctttaaagtatcttttgttgttgagttgtccttttggacaactggtttagcgttctcattcttgtgttttgccatatttttcgagttgcctcgctttcgctcaagcccttcaattcctaatgtctcaaatcgcttttcccattgccaaattgtacttggcgaggataaattaaagtgtaaggcggttactggaagtgaggcctgattttgtttcctccagtttaatacatcaactttaaactgactagtgtattctaagtccatggcttttggctgaagtcctttaataccaaatctttcaaatcgctgaatccaaattgaaacggtagccttgctgccaatcccatactttctcgctagtgaataagctgcctgaccacttaaatactcggtgacaatcttaactttaaaatcgaaattaaatttactcataaatgaaacccccaaaattggatttttctgtccaaccttgggggttcactttactaaatcaggcttggcgggggctttttcattgattatttatcttcagtgacttcttcttgaacagtttcaacagcggcggctgcttcgtctttggcttggccaaatgcactcttgccgtcgatcacgatatcgtcgaaatcttcttggctagcttcaaggctgccgccaaattgtgatttcaagtctgctgttttttcatcaaattgtgcttttgcttgttctttgatatcagacgcattgtcttgccaatcacttgcataatcatggacgcgattcatgtgtagctttgcgtcgtcttttaagtctgctgctgtttcacttgctaaatagtagtagtcttgtgcgcgatccattaaatcatcacctaagtccactaattttgattgtaattccttacccgtcttaggggttaacattaatgttgcaccaatggctgctgcgccaccgactaatacacctaatagaaaatgtcctttttttgccatgagaattactccttatcctttgtttgacgtcgattttggtaaaatcttaatgcacttgcgccaaccttcgaagcgaccgttgccttagcggttgtccgcccaacgttggtaacatgttccgttaaattgcgacttgccgtattcaaacttgaaacgctctcgccaagttcgccagccgctctgaaaacaggatccaagtcagcgactttcccgttcacatcgtctagcaatacgttggctttgctgagtaaaccttctacttctttagataaaatatcaacattctcagtaacaaccgtgacactcttgttggcttccgttactgtcttagaaacatccgttaatacttttgtgacttttaatagcatcactattagaaaaacaactaggaccgcaaaagcccctgcggcgattagcgccgcaatttgaccacccgtcattgatttgttcctcctacttcgttatctattacattgtctcttaaagactagaatagcattatttcccttaaccttcaattatcttcactatattaggtgccattttttctgacatttgctaaactaaagacatgctacaaaaaaggagtttcacgcatgttcacacgtttattagcggccgcaccaactccggccgaatctgttcagaaacagaccaatatttttatgcgctacatcacttcaattgactgggataaattactcagcaccctcgttgctggattgtttcaaattatcctactctccgctttattctacctcatcaatcgcttaggtaaatacatcattaagcgtagcttcagaaaataccgcaaaactgatggtttctcaagtaaccgcatgaacaccatttatactttgatggtcaacgctttttcatacctcgtgattttcttctatctctatgcgctactcagcgttctcggcgttcctgttggtaccttgattgccggcgctgggatcttcagtttagccattgggttaggcgcacaaggtttcgtcaacgacatcgttaccggttttttcatcctcgcagaacaacaattcgatgtgggtgatatggttaaaattggtacggtagaaggcaccgtcaacgcgattggcttacgaaccacacaagttcaaagttacgatggcaccttaaatttcattcctaaccgcaatatctcgatcgtcagcaacctatcccgcaatgatatgcgtgttctgattaacattcgcatcttacccgataccgacttacaactgttagcggcaaccgtcaatgaagtcaatgtgcaactggtgcccaaacatcctgaaatacaagatggccctacgattctcggggtaaccaccctcgcagatggtgtccttgcttaccagattgttatgcacaccactaacggcgaacaagctgccactaaccgtactttcttacaggcttacttgcaagccttgaatgaagctggtgtcccattaccttcaacacccgttacaattcccaccaaataaaagtcccctcatataaaaaggagaaccgcttatgccacttattaacgcactcaaaggcgccctaatcggcgtcgcactcgtaatacctggtctatccggcagcattttcgccgttatcgttggtctatacgaaccgcttctggcggctatcgcgcaattcaaaaaagattggcgccaagcaattggctttttatggccaatcgggattggcgctgggatcggcgtcttactctccaccaaaatcattctttggttatgcaccgcttatccactagcggcatacagtttcttcatcggtcttgtcgtcggcagtctcccattcatctggcgtagactcgccggactcaactggcaaaaagtgttaatcgccatcgtctgtggcgcaattatgctactactcacccagattggtggtcaccaatctgaatccgacatcgctatcaaacaactcactaccctccaagactttggcacgttactatttgccggcttcttctcagtatcactcatgctcatcccaggcgtctctgggtcaatcatgctcatgattgtgaagcaatatggtactgtttatcacgctgtcagtcaactactcgacttaatggtctacctcgtcacaggacgcttgacacaagccacagaagcgttcaaaagcgtcgcgctcctcttaccgttcatcattggggccgtcatcggaactgtgattgttgctaaattaatgcactacctattagcacacttcgtcgaatacgtttacgccggtgtgctcggcgttgtcattgccgccatctggattcttgcccaaaccggcgtcgcaccagcctggccagccctaacaaccgccacagcactactaggacccatcgcactcatcatcgctatgatcatcctaggcacaatcgcaacaatctacttcgacaaagcatagagtgctgttaaagcgatttgcctctgagcattaattaaaaatgagcctcaatctcgtcttttgagattaaggctcattttagattaagcggaaggtgttgcaattaaaaagcacgtttccacaaaaaaactatccacacccttcccaatcaggttgtggatagtttttatttattatagtgctttaatcgctctaagatgttcaatggattgaagtcaatatttgagacagattttaagagacattcagaaccgcgtttaccttccacagctcaaataaatcattaatcgcgattaataacttatttgaaccctggaaagcattaaatcaggcggccatttggctcgtaagtgttgcaatttcaacttgtaagggggtctggtagcccagtgaactatgaattctcttcctattgtagaaagcatgttgtagaaagcatgcacatattcaaaaaggacggcagcggcagtttcataatcttcaaagaccggcactggataaacacattcctttttgagggaagcgtgaaaggattccattggcgcattatcatacggacaacccttacggctgtatgagtggcggatatgtagctcagttaaacgttgattgtaatcatctctggtatactgtgatcctaaatccgtatggataatcaggtccccagtaatggttcgatttttaaccgcgctttcaagggtctttaagactaaatcagtagccatcttttttgagaacgaatagccgataatccgtcgtgagtgcaggtccatgatggttgataagtaacaccagccattacgcttcgtttgaatataggtcatatcagcggtccatttttgatttaaaccagtggtcgagaaatcctgcttaagcaagttgggacgctgttcaaccttggttttggaagccgaagccgctttccacttattgacggtaacggagtggctatccagtcccttcatgagccgggaaatccgtcgtggactgcaccgaagctgcagtggttgaagttccagattcaattcatggtggatcttcataacaccgtatcgctgcttaaattccgcaaagatccgcagaatccgttgtttcaagcccgcatcttcggccggcgttttgaaggtttgggggatcgataacgataatactgagctctggaaacaccgaggattcggcacatcttggttacctggtggtgatggctttcttggtgaatgtaatcaaagatattggttacttctgcgcaaggaagcccagggctttttttaggatttcgttctcctcagacagcgaagccagtcgcttttccatcgctttgatttcgtctagcgatttaccggattgagttttggcctggccctggatccacttatgaactgttgaatagccaatgccatattctctggccagttgggcagctgattcgccttgcttatataggttgataatgttttgtttgaattctttgtcgtaacgagttggcatgtaaaaattccttccttttgagagatgatttattcattataccctctcttaaaagttgtctcaggaatcagcttacatctaggtaatcgcatcgctgcatcaccgacagaattactatttggaatataagcagggaagaaattcaacgcgtcgtaagtccctgtaatccccaataatccaggagctttaccaggtttatccgttcccttaccaatcttagtagttgcccaagcattgattaatgtacctaaattgtttttacccgtgctattagaagtaaagttattgtcaagatatgccggcgcatcattataccaaccatgtttctcatatccgataaaccgttgcttcatatcaatccaatgcattttccccgcactgtctttatatatcatcacttttttataatcaatgtagttatctttaattagaccattttcatcatatttaaggttcgcgccagcaagcgatccatactcatctatagcaggcatatgcactgtttcacttgaaactccaggaatataaaccgggaaagcattgtaaggatatggaatttcaatttggtcaccgttgccatcaacagggttagctacatcttcaatcgttgtaacgttgttttgaccagataaaggaatcgaaaagtctggatattcactgcccggatcagtcaaatctgaaagccagtatcgtggttgaataatcaccgatttactcgtggtcgatttaacgctttcctttttctcagaaatacttgaactcgattctgaatcagaactctttgaactcgacttactatctgagcttgttgaagcactgcttgtcgattgtgattgcaacgaactggctaagctttcagaaactgagctcgcgccttcaattgcgcttcgtgggttcacaatcttagaagtcgtgttggctgtcaccgtctccttattcacagccaccgctaatgcgctaccaaatgactgtacgattgtagtggttaagaaaataattgctaaaattagatggacgactctcttttgcatatcaaatttcctcccagttctaatgcctttaaaactttgttacatgataatttttcgatattttgactatgttcatcaggcataactttgacggtatcactacttccccctaggctagactcccaagaatacctatgcaggggtgaatattagtcatctaaccatcattacccaagaacaatatgtaacgatataagaggttcacaactcatgagttgcgacctctattaataattacctttattacataaaatatttgtccgcgaatttttttgaaatttaaatattatgaacaaatccatttaaatgcgattatatcaacgtttagataatatatattttttgaataattacgaaaaataaacttgtatgcccttaaataatggtgtaaactggttttatattaaaggggtcacaactcatgagttatgacctactatcatggattttttaaagtcattacgtctaacttaattttgcttacaaatgttgatataccagtaattaagctggattcagtccaaaacaaaaagcgtcttccaaacattattcgttggtgtctggaagacgcttttttcacccttattgtcctttttgggttgtttctgcggttattggctcgatttggtattctttttcgatattatgggctactcggttgaagcttttcatcatttcgcgccgggtaacaatccctgtgaactccccttcatccgaaatcacaggcagataggggtgatcaactaagagatggagcgtttcttcaatatcatatggatctctaatcgtcacgacatcggtttgcatgacatctttaacggtcagcttccgcaaattttcgaaactgaggttattcaatccgagcatcgtctcggtaattaacggcatcgtcaacatccctttgaacttcgaatggttgtctaagacgggaatgctcgaatatttcaccgtggttagtagaataaacgcatgttccaaggagttgctttcttgaacactcgcaacaacctcaccgggaattaagaagtgttctttattttctaataataagttcgaaaatgcatctgaaatcatcacttggcctccaataaactaatgctacttttagattgtaacaaagagcaaacacaaaagaccatccatagctactaaactttggatagtctttagaattaggcgcgtttaaatgtaaagtgtaactgcgaaacgggttcgaaccgacgattgtagtactggatttgatattggtcaggtgtgacgtctacaacggcgtatgtccctttcaagtcacggaactgcccccgtggttgggcaatactgccagggttcaagagcagcacaccttcgtgcatttcacaggccaattggtgtgtatgcccatagaacgcgagattagcttggctttcttgggccgctaataaaagccgcattaaatcgccatttacaccatacaagtgcccgtgcgttaagaagattcgttcatttgcaactgggacaacaacttgtgctggaaattgaccattgaaatccatattgccttgcacaacggtcatttggttaaacaagggatcatcggttgttaattcagaatccccgcaatgtaacatggttactggttgatcttgatactgcgccactaactgcacgagaatatcgcgatcaccatgactatcactcacaacaacaaaacgcatactaaacagtcctttcggcgccaaggggcgttgtttttttgaaacgtgcttcttccgacatattcttccggctagctacatcagccaaatctaaacgtgatcctgccgtcgcacgctagtctttgatccattctttccatttatcttctaggttctcaattgcttttgcgcggtggctgattttatttttttgttccaccgtgagttgggccatcgttgcatctaattctggcacgtagaaaagtgggtcatagccgaagccgttatccccacgaggaatacctagaatttggcccttcacgttaccttcaacgactaaatcttcatctggtcggtctggtttagcaaaaaccaatgttgtatggaaggttgcggtccgcttttcagcaggcacacccgttaattcatagagcaacttcgcgttgttgccggcatcgttatgatcaccagagaagcgtgcagaataaattcctggacgaccacctagttcatcaaccattagaccagaatcatctgccaagacaggtaagtgtaagatcgctgcaatttgatccgcctttaggcgagcattttcttcaaatgtcgaaccagtttcatcaatgtttggcaattctgggtaatctaataatgttttgatttgaatcccttccgctgcgaagacggattcgaattcgcgggccttacctggattcttcgtggcaatcacgattgtttgttcatcggtatcagccacttggatattcggttgaacggcgcgttcaaaactggcttgacgttgatcattggttcgcgtcacaccttggctcgcacgtaaaataagttcgttgaattcactactattgactgcttgttgtccgccgagttcaagggcgatgatttgttcctgcggtgtggccaccatcgtcaccaagctagtcgctaggtcgctttccgcggcgtctgggtcaccgagtgactcaccagcgaccatcgctgctgtgacggctgcagcgacttgtttggggcctttgccttttggtaataaggttagtgcgcaataaacagcgttgaagagttctgctaataagccgccaccatcttcaagacaggttacggtgatagtgagtgcttcggttgccaataaggggcgtaatgtcgtttgcaaccattctaattggtgcgctgttatgccattgccattgacttgcaaggaaccttctgtaggttgaacagcagcgagcactttggtatcaccgcgttgccatagaacagaagcgggttgttgctttagaaaacgccaagtgacttgcactggccgtaaatcattatcagcacgattattcattcggaccatcgtttttttcctccttaatgataacttgttgggcttcaagggttgggattgctaaccattgacgcgcgattgcttcgaaattggttacagatccggtcgtataggtgtgtagttgcccagctgttgcatcggccaccaactgattgcgatcttgtaatgcctgaatcaaactatcaacagcggcatgcgcggggtcaaccagcgtgactgccggtccaactgtcttttgaatcgccgcggttaataatgggaagtgggtacagccgagaattagcgtatcaattcccgtcccgcttaatggcgcgagggtttcgtcaaccgtgttttgcacagtttcgccactcaattggtttgcttcaatcatcggtacaaaagttggcgcagccaaactcgtgacgtgtgtcgccggtttgagtgcctttagttgataggcatatgcgccactgttaatcgttccggtcgtggcaattaccccgacatgccgattacgggtcgttgccaatgccgcttggctacctggtgcaatcacaccgattacaggaatcgtcaattgcgcttgtaaatcaggtaaggcggccgccgttgcggtattacaggcgacaaccaatgctttaatattttgcccccgtagaaaattggtcatctgccacgcaaatttgcgcacggtttccgccggcttttcaccatatggtaggcgcgcttgatccccgataaagaccatgtcttcgttgggtagacgtttaagcgcctcttttaagagggttaggccccccacacctgaatccataaaaccaatgggttgtttttgcatattagatttctcttttcatttcaggatacactcgtaacttctattttctcttttttcggtgcaaaattcaactaaaacaacgggcacggccggcaattcacagttggcgttaatttttataaaaaataaagagttttcgcggtataataggagtacttataaaaaacgaaccataaaggagtgccactgtgactcaatcacgctatgaacaactcgcccaaaatccacaaactgcatcatatctgacacaggcaacattacgggatatcttgttaccatcaattcttggggccgaaaatgacgccatcagctattgggccggtaagcaactcgctttgcaattcccactcgattctttcgaagacctctgtgccttcttcgaacaaatcaacttcggccatctcagtcttaagaaacagaagaaggaacaatacttcttcgaattaacaggcccgattgtcgcttcacggattgcggatttcgatactcctgacttccaattagaagccggcttcgttgcccaaatcctcgaacaacaattgcggattgtgactgaagccaaagcaaccattgaaaataaaaaaaacgtaacgattttcgtccaaacagattcaaaagcaccaattgaagacgaagcagtcgaagccattcatttaacggttgatgcatcacaagtcgcatctgtaccaagtgaatcagaatctgttgaagaagaaccagcacctgtgatgacacaacctgttgaagcagcccctgaagaagtggctgctcccacactagaaccagaatccgttccagaaacaccagttgttcctgaaccggtggaaccagaaaacaagccaacttctgaagaaacaccacactacacaagaacccgcgtggcagacttaccaagtcgacgagaaatgcatagaaaacacagataagcatgtgctataaaaaaagggtaggaacaaaattaaattttgttcctaccctttttgaatacttagcatattaaacgtgttaatcctcaagtgataaccggctctgtctcactctaatcaaagtcatggacgttattgccgctgacgttttgccagtcgcgacttaagaagtcgtttgacatgtcatagtgcactgtttttgcttttttcgttctcatgaatggttggagtttttgatcaactttcaaccagccacgccagccaagatgaatcgtatcttgcatgaagaattgttcattaccgtcgttagtcatatcaacaatgttgttgaagccttgcgttctcaattgatattgaatcttcttatcaaaacgattcaacatcgcttgtgagagccctgtataagcggcccaacgcgcattaacgggtggaatgatgaattgaacagatactttatgggctgcgaagtaatctaacatcaattggaaatcagcaaactcaggtgaactttcatagttaaagtgactttgttcacccttcaatttaccaacattgggtttaacccgttttttgtaaaaactattttgaatgccaaacggattatcacccgttactttttgtcctaattccgttgcgacttgatcaagttgcatgttatcaggttgttttggtaacaccttcaagcctttacgcaattcgcgttcacgaccccgaatgaataattggctgaagagttgatcttgatgttgtaacgctgggcgtttcacattattaatgtatactttttgcgtctccgttaaaggtatgcctaaagctttgttcttcaatgcatcccgcattaccccgttggttgtatcacttgtgagttctagaattcgtttcgctgcataccgcgtactttcagaatccttcgcgtggattaagaaataactggtttgtagtggtgaatagaagaaatcgaacatctcaggttttaccccttgtggtacaaaccattgtggcgaaataacgacgacggcctttttaccgttcaagtgattaccagtcgcttgaagtgataaaaagtgggtcaatgactgagtccctggtgcccctagtaggaatggcttattttgccaatcatacttgtttgccataacagatggatgtaacgcgtccattcgggatagttcggatgaaccaatcatcggaatgtagttgtcgttaaatgcagcatctttgatggcttccccttttagcacattggcggataatgacgtcgccgctgtcgacaacgtcttttcgctaggtcgtcctaatcgaagaggtgatagtaataaggctgttaagcagagaccggccactaaaaccgggccgaaaatttgccataaacgtttaaacattttattgcaattcctttacgcgagcaatgatcttgttaggtgttgaccatgcttcacgatcgaattctgaaacaggtacttcaatatctaattggccttgtaattcaagtaacatttgcacagttgccattgaatctaatgtccctgattcgaataattccatatccatatcgtctttaatatcgtcgttccctgttaaatctgctaaaatttctactactgtattttctacgtccatgattaaatcgctcctttagtgtgtaggtcttagtggaaccataaccggtccaaaaagcctgagaaaattagaaaactgagacaaacggtgttaaacgttgcaaaaattgctaagtagttcgtccaccgattgctgataatgtgatccttgtgtttcttcttgaaacgcaaccagacatcggtaaggatgatccagatggcgtggaacaagccgtaaacaatgtagtaccatgtcaacccatgccagaagcccatcaataagaagagtgttaaatagccgagattggcaatgaggaccttgttcttggtaatcttatgtttcatcaagaagaacactaagcgcatgtagatgtaatctctaaaccagaatgataatgtcatatgccatctattccagaattccttgatattggttgatgcaaatggcttgttaaagttaattggcgtttcaacacccatcacataacttgtcgcaacagcgaataaactgtagcccgcaaaatcgaagaataaatacatactgtaaacatacatgtaaccaacaagcccccatgagatatcaaggaacccaccgcgactcgccattgctaaatgcgcaactttagggagtaacacggtcccgaataagtaaccgagcataaacttatacacaaagcccaacatgaagttgtggactgccttgcccagtaagtcgagataatggtcacgatcaggaacttttaggtaatcttttttgaaacgacgataacggtcaattggtcctgatgaaatcgtcgggaaaaatagcataaattgtaagaataaccatggttcaaatttcttaatactgccatcacgggtttccataatcatcccaactgacttaaatgtcagataactgatccccaagaagccaagaattgaattactacccggatttaagaatggcacgaacttgacaatcactagcggcataatcgctaagataacagccagatcgaatagccaggtgttgttgtgcttttgacgatagacagtgtatccccaaatcagtgctccttcgaacaggacgtaaccaatcaaggcaattccctggtgaaccttatccccgtcaaagattaggatcaaaaagagcagtgagacaagtgtctcataaacatgccaacgtttgccgttaagtaagccaatcactaacggaattaacgccgcacctagaatgagaaagtagttcggattcgcgtacggttgtaaattaggcattgccattaacctctttaatcaacgctttacgatcaatcttcccattgacggataatggtaatttttcttgataaacaaatcgttgcggaatcatgtagtccatcgtattttcagcgagttctgcttttaacgtcttcgttaaatcattgcccgcttcttgaccgtctgctggcacaacataggcaatcaattgggtgacttgatgggctttgttgtagcgcggtacggtacatgcttgatgaacggctgctaattggcttaagtggtggtcgatttcctctagttcaatccggtaaccgtgcatcttaacttggaagtcggtccgccctttataaaagagcaagccctcttcgttttgggtgaccaaatcgcctgaatggtagaagcgttgcccgtctttttcgaagaaggctgcagctgttttttcaggattattcaagtacccttttgaaacacttgggccactgattaagagttcaccaggttgaccaactgcgactggattattttgttcgtccactacgacagtttgagtatcagcctttgtgtagccgattgggagtcggtcgtaagtcgctaagacctccgccgtaatttcgatgctcgtcatcgcaacggtcgcttcggttggaccgtaagtgttgaagatttgtgcatcaccgaaacgttcgattaacttcgttgctgtttgatgcgttaattcttccccacagaagacgaattgttttaattctgggaaatgttcactattaaatgttggtaataataagcagatttctgcaaaagatggtgttgaaacccattcgttcaccttaagagttggcaagacttcaaataacgtcttgaagttgtccgtcacagctttttctaaaacgacgagggttgcacctgagcataacccgggaaataaatccatgactgataaatcgaatgagtatggggcctgaattagaacgcggctgttatccgcaacgttgaaagctgggttggcccagtcaacgaaactttgtaaattgctttcgctgatttggacgcctttaggtaaccctgttgtccctgacgtgaagatgatgtagaaattctcattcccttgcacactttggctagcatcataatcggttgctccgtttgcaatcacatctgtcaattgggtttctgcgaaaacgggcatattaacatcaattgctgtttcactagcccatgataggacagcagccggtgttgcgactgattcaatctgtttaatccgcgctggatctgaatgttgttccactggaatataagaatggcctgctttaacagcacctagaaaagttgccaccatctcgaagttttgaccaccgaagataatcaccggtgctttagctggcaagtcttggctttgaatgaaatgagcaatccggtctgaagcagcctttaagtcggcgtaagtgtgttgcgtcgtgcctaattgataagccacagtttgtggttggtcaattgcaatcgcatcaatttgttgaatgatattctttttcattttaacgacgctccttcattagaattcattgtagataaatttaggactaccgataccactgtaatcatataaataaagtagaattagcagaataacaaaataaattatggttttgccaatgaaattgacggccggtttattccaaaaattaagtattttttgacccattttttcaccatctctttctctctctttttgattttcatcattttgttcatcattaaagttaccacaacgtttattaaacaaccactaacatttttgtcacacgctgtcacataaaaaaagcacctactaaatagtaggtgttttcataattagtcggtatattgtgccaaaatcgtttctagttgttccttattatggaagccagtaattttttcaacaacttgaccatcttttttaaccactaacgttggaatcgccataattccgaaattagcaggcgtttctggattagcatccacatccattttactgaacttaactttgtcgttagtttctgccaatgattcgataacaggtgattgcatccgacaaggaccacaccaagttgcccagaagtctgtcaagacaacgccactctttgtttcttcttcgtaatttttatctgttaatacttcaaccattattcttcgccctccattcaattgtacaaaacatattatttatcatgatactcctatatggcgtaaataacaacttaactcgcttattattcgttacaaacggattattttatccccgtttaatttaacaagcctaaaaaaacacccccaatcaaaaccagaaaggactggttggattgggggcgtaaacgtgctccagcaggcaaactcctccggttagctacaccagccaaacgaccaacaagttggtcattcgtctgcctatgctaatcctcggcgtataaccgcctgcttccgcactctatttgaatgttacgattgttgcgccattgccgcctgcgtttgctggggcgtattcgtatttcttgacttggcgattgccttttaggtagtcctggacaccttggcggattgcaccggtccctttcccatggacgattgtcacttgttggtagttcgctaacaaggccgcatcgacatattgatcaacttcagccattgcttcttcgtagcgtttgccccgcaaatcaagttgggctttaacataccgcgctccaccgctgttgacagttgtcacatgccgttgaggtcggttatcttcaacgactttttgtttctcaaggtcttcgttagcaatcttcatcttgataatgcccatttgaacttcccagttcttggcatcgatttgccggactaatgtcccacgttgaccgtatgaagtaactaaaacatcatcgccttctttaagggtttgacgtcgttttgcccgttgcaatactttgtttttcttcaaggttgtttcttggtgcaattgccctaattccgacttcgcatcgattaattgattttccttaatctgggcgccttgattcatctgcatatcccgcaacttggtaatcactttgtctgctttaacttcagctttttcgacgatcgcattcgctttttctttcgccttcgtcatttctgtttcacggtcttcgaagaattgttgataagcagttgataactgttgatgcaagtcagtcgcttctgctaattcatgccgcaaagcttggtattccgtttcggctgccttacgttgattttcgagatcggtaatcatattatttaaatcttggctttcatcgttcatcaattgtttagcttgttgaacgattgagcttggtaaccctaagcgcgttgaaatatcgaacgcgttactacgaccaggcaccccaattaataaacggtacgttggttgtaaggtagccacatcgaattccatgctagcattaatcgtttgtggccgattgtaaccgtaaattttcaattctggataatgggttgaggcaacgacatcagcgccaacaatcccaatttgatccaagatagcgatggctaaagcggccccttcttgtggatcagtccctgcccccaattcatcgagcaagaccaaactacgatcgtcgatatgttggagaatctgaatgatgttttccatatgtgctgagaacgtactcaagttctgttcaattgattgttcatcaccaatatcagcaaaaatatccgagaagacgccgacttggctctcctcacgcgcagtgataaataagccagattgggccatcacttggactaagcctaaggttttcaacgtaatggttttcccaccggtattgggacccgtaacaacgatggcctgataatccgccccaatcgcgatgtcattagcaacgactttagctgggtcgattaatgggtgccgtgcttgtttgagttcaacatggttttctaaattaattagcggttcagtggccttcaacgctttagcaagttgagccttagcattgacaaaatcgagctgccccaataattcagcgttggctaaaatattgtggcgttctggcatgatggcttccgataattccgccaaaatccgttcaatttcttgttgttcttcaatttgtaattggcgcaagcggttattcaattccatgatggcttgtggttccatgaaaagggtctgaccactagcactctgatcatgcacaacgccgccgaattggccacggtattcttgtttaacaggaatgacatagcggtcatttcgaatcgtgacaatcggatcactcagatatttagctttagcaccgtgtgtataacttgccatccgcgatctgatttggccttccaattgttttaaaccagtccgtaagccacgcaacttggttgaagccgtgtctaaaacggcgccatcatcagcaacagaacttctaatcttttcagttagttgcggtaaagtcaccaattgggcaactaagtctggcaacgcctttaaggttaattcctctttttctaagtcatcaaagaaacgcacaaccgcagaagtcgcacgtaaaacccgcccaacttgcgcgagttcggtaccgtttaaagtcgcaccgatttcgattcgtttcaggtgcggacgaatattatctaactgtggcaaaggaatgccaccttttagccgttcaatatcgaccccatctttggtctggtccaagcgttcttgaatcaattccgcatcgttagcgggggttaattgtgtgatttgttcttgaccaaacgccgtgatggcatggccttgaagcatttgtttaattttatcgtattctagtgtttgtaatattttatgattcatttaagttagctccttctaaaaaaggggcgacttccgtcagccccaactgcactatccattttagccagcaatccaccagctcgtcacttgagaggtgaggactggtgtgtgtaagacaatgacgcgcgcaactgtcgagttttccaatgtcttctgtaagccatcgactggcactaaagccagcacgtagaggagcaaaaagagccccacgtaaacgaccaagaaactcaaaagtccaccggctgccttgttaaattgcttcaaacctggcatataagtcaatgaattcaacaatagtccgatgaagcgcaccaacaagccaccgataaacatcacgaggacaaaggcgacgccgatataaaacgcatcatcgagtgacaacccgatactcttttggaaaaatgcaaaatagctgtcttcagttgccgatgggtatggcaccattaaacttagcttaggccctagtgtttggctcatcgctttggcaatccaaaagacgataaagtagccaatcgtgtagacggcttgcatgataaacccccgtctgacccctgtgtaaatggcatataacagcattaagataataattagacttaacatgagttccccttagatacgcgttttgtggcgtggatgtgtgtatgattgattggataaagtattctgaaacgtgctccataagccatcttcttccggttagctacgcctcgcaaacaatcgacttcgtcgcttattcacgagtctatgctaatcctcagaagatacccagcttattgcgcactctgatttttgaaacgtgctcttgcaggcatatttctgcgcttaaccaaatttgccaaatcggcgattgcatcgccaattcgtcaaatccagttaatactcaaaatataaccgcctgctgtcgcactctttttttaacgtgctcctgcagatatactcttccggttagtttcataccgcaaacgatcggccttgccggtcattcacggtatgctactaatcctcagagtatgaccatctgcagtcgcactctaattttatttgctagttcaactgaactattttatcatgaaataagggaaagtggcaattttactccgaatctcttcatttgccactcattaaggagccaatcgtatgcaagcagtcattaaagtgacaccctcacaattaactactattcaaaaaaattatccgaccaaccgtcaactaccgccgggggccgtttttgcgcaccaagccaatggactaagcattaccggctataaatctggcaaagtacttttccaaggcgctagtgccgaacgagaagctgctaagtggggcaccgctacccctagcaaagcaaaatctgctagccgtactaagcctaaagccgccaaaggcgatgttttaccagctgattttgccaaatggtccgttttaggctcagatgaagttggtaacggaagctacttcggtccgctgaccatcgccgccgtctatgtcagccaagaaaatctggcgttcgtcaatagcctaggcgtcgcggattccaaaacgctaaccgatgcacaaatcgatcagatggcaatcaagatgatggctaaactcccctatcacatcgtcaacatcatgccaccgaaatacaatgaagtacacgccacaatgaacatcgaaaaaatgaaggccatcagccataatttcgcactcctcaaagtcctccaaaaaatccaacccgaaaaacccgctggcatcctcattgatcaattcgaaccacgcggcatttactacaactatttgaagaatgaaccggttgttttacgcgagaacgtttatttctcaaccaaggcggaacaatttcacctcgccgttgctgccgcttcaatcattgcgcgccaccaagccaacctatcaatgcttgaactgtctaaaaaagcgggccgccaaattccgctcggcaatcatcaagcagttaaccaaatcgccgcagatttactcgcacaaggtggcatcgattacctaggcgaattcgctaaattgcattttattaacacggaaaaagcgaagaaattgttatagagtgcgactacaggcggtgatattttgagcattaactggatttgacgaattggcgatgtaatcgctgatttggcaaatttagttaagcgcagaaatatgcctgtaagagcacgtttaaagtgcgtttaaaacgggttgactctgagcattagcacagtgttgtgaatgaccgacaaagtcggtcgtttgcgatacgaagctaagcacaagagtcagctttaaaaagcacatttcaacccacaccttctccacataaaaaaagggtcccgactgcaatttaattaattgctatcgggaccctttttgaaatagatggtgataacgtgctttcatcaacaacttcctgtgctttgctacacttatcaaatcggcgattgcatcgccaattcgctaagttaggcaaatgctcagaagttccccgttgatgacgctcttcttttctttaacgtacttttcaaaccatacttctgcggctagctacgtcccgcaaacgatcgacttcgtcgctcattcacgggacgtagctagtcctcaaagtataaccggtttgaacgcacttatttcatgttgtcgtctgccaaaaatgtgtttagtacttcttcaaccatttcccattcttcgtcgtcttcgattgggaataggtcacctttgctggcatcgcctgcatcgtctgatgtgaatgagaaagcttggatatcaacttcttcatcttcttcagcgcttgttgggtacaatagcacgtatgatttaccgtaatcttctgaatcaaatgtaaagagcacttggtataattcctcgttaccttggtcgtcgattagtgtaatttgttgttcttcatcttggtggatgttcttgttatcttcagtcattcatcaaaactccttaattgttttatttattagccttgtgttaagcgaccgtgcgcgtccaagtagttctgcaaaatcatcaccgcagcaagcttatcaatcacttgcttccgtttcttacgtgacgtatctgcttgttccactaacatgcgttcagcctgaaccgttgttaggcgttcatcgatgtaatcaaccggaatctctgggaaaagttcactcagcattgccccgtattcttgcgctttaagcgcccgtggcccaatcgaattattcatattcttgggtaaccccaaaacaaaaccagtcacttgatgttctgcaaccaattccttgacgcggtctaacccaaattctgattcatcttcattgatgcgaataatctcgaccccttgagctgtccagcccaatagatcactaatcgcaatgccaaccgttcttgatcctacatcaaatcccattaagcgcattatttcgtcgtttccttatccaaataatttttaactaattcctcgataatctcatcacgttcgtgcttgcgaattaaattacgagcatcattatagcgcggaatgtatgctggatcaccggacaacagataacctacaatctgattaattgggttgtagcccttctcttctaatgtctgatagaccgtcgttaatgtttcatgaacattcttggggctatttttaccaaaatcaaaatggactgttttatctagattcatctctcaacacctcaacttttcgctacttatacaaccatattctactcgaaaacaggacaaagtacaactctcccctctcttagcagaatgcggatgagagataactataacacatttcgctaaattgattaacaaaaagaacaaaaaaataacgggattgcaatcaataaaaaattgacgacaatcccgttataagttaagcgttcgctaaagctgttttagcagctgccaaagcatctgcgatcccagctggattcttcccaccagcttgggccatgtctggacggccaccaccgccaccaccaacgagtggtgcgatttgtttaatcaaatcaccggctttaatccccgctttaatcgcatcaggtgcgaccgcgacaatcaagctaaccttatctcccgcaactgttgcgagcactaagacatctgaaatttgtttttgttgccattgatccgctaattgtcgtaattcgttcattccggcaacttttgcatcagcagccactaagcgccattgaccaactgtttcgacattttcaaaaacattgccagcttgttgttgggcaaattttgctttgagttgttcgttttctttttgttctgcttttaagtcagattgtaattgttgaatcttcttaggtaaatccttggtttgagcaactttcaattcaccagctaattcatttaataaggcttgtttgtcattcaaatacttgaaggctgcctttgaagtcacggcttcaatccggcgcgtcccggcaccaatcccagattcgctcgtaatcttgaatagaccaagatcagcagtgttagcagcatgcgtcccaccacaaagttccattgagtaatcaccgatttgaaccactcggactgtcttaccatatttttcggtaaagagtgcgatggcccccatttgtttagctgtttcaatatcggtttcaacagtattcacaggtagtgcagcccaaattttttcgttcacaattttttccacagtggctaattgatctggtgtgacttgaccgaggttcgtaaaatcaaaccgtaagtagtcaggttcaaccaatgaaccagcttgatgcgtatgttcgcctaaaacatcacgcaaggcttgatccaataaatgcgttgcggtgtgattcttaatgacgccaccgcggaaggttggatcaactgataagacatagtggacaccactaatcatttcttcgagcacttcaacggtgtgtaatggttgcccgtttggtgcgtattgcacgtcagtcactttagcgactacttgcccagctaggttcttaatgatcccttgatcagcaacttggccccccatttcagcatagaatggtgtttggtcgaagattaattgcgccgtaccactcttaatcgtttgttgttcggcattatcttgtaagatgacgcttaacttactttctgtttcaagcgttgtataaccagtgaaggtactttccactttgatatccattaaaagttcgttttgcatccccattgattgttcatcactacgggcattacgtgcacgtgatttttgttgtgccatttcactttcgaaaccagcttgatcaaccgttaagccttcatcttcggcatattcagttgtcaattcgattgggaaaccatacgtatcaaataacttgaaagcatctgccccagcaatttcactttgaccagcagctttgacactgtcaatcgtttggttcaataaacgtaaaccatcattcaaggtttcacggaaacgatcttcttcagaacggatgactttttcgatgaattctttttgtgctaatacgtctgggtaatagctttgcatgatttcaccaacgattggtactaacttgtacatgaaagcgtcgttgatgccgagtttcttaccatttaagatggcccgacgaattaaacggcggagtacatagccgcgaccttcattggccggcattgcaccgtcaccaattgcaaacgtcacagcccgcgcatgatctgcgataatcttgaatgaaatatcatcagctgcattttgaccgtattgtttgtggtcactcatcttagctgtcgcttcgatcaatggcatgaataaatctgtttcaaagttggttggggcttcttgaatcactgaaacaagtcgttcgaggcccatccccgtatcaatgttcttgtggggttgttcaacatattcgccgtttggtaaatggttgaattctgagaacacgatgttccaaacttccagataacgttcgttttcgccaccaggatagttttcaggatcatcttcgctaacgttgttgaagctttgaccacgatcatagaaaatttctgaatcggggccacaggggccttcaccgatatcccagaaattatcttcaacttcaatgatgtgtgattctggcaaaccgactttttcatgccaaatccggtgcgcatcttgatctttaggataaaccgtcacgtataatttttcaggatcgaaaccaatccacttgtcgctggttaagaattcccaagcccatggaatcgcatcttctttgaaatagtccccgacagaaaagttgccgagcatttcgaagaaagtatggtgacgagcagtcttcccaacattttcaatatcgttggtccgaatactcttttgtgcattggtaatccgtggattattaggtacaacgcgaccatcgaaatacttctttagggtcgcaacccctgagttaatccataataatgtcggatcatcatctgggacaagcgatgcacttggttcgacatcatgacccttttctttaaagaaatctaagaacatttggcgcacttgcgcactggttagttttttcatcatgtttgctccttcaaaaaaataaaacaccgctgcaatttcaaggacgcaaaagcgcggtaccaccttgattgcaacgatgttagtcgttaacctctttatgagtttattgaattgtttgtgatgttggggagcacgtcaaccaatggcggcaccttctctcagtctagaaaggcgttcctgtctccgtcagttcgttgcgtatatcccaacacttccaaagtataaaaaagatttgctgaattgtcaactaatccaaggtaacggtaatcgcaggccgatagtagcactgaagcgtcggattgcccaatgccgccgtttgaatcccagattcataggcgggtgcttcaggcaaccattgttccaaactataccgtccccctgtcacacaagcaccacccttataaacaagtggatcttgagtaagttcataaccgtcagcggctgttgcttgtaacccaaatggcatctgctggcgctgagtcggtcgtggtaagtgattaccacttaaccacaacgtcttactccctgcacctttaagccattcatactgatcaacactcaccagatcaaaaccgcgccgccgcaatgtctggcgtagttcactttcgtcaccattagttttttcaaacacttggtaacaatctggtcgcccacccgcttgtaaaattaggtgcgcactttcaagtgtttcagctgaattttgttcccgccgcgcccgaaacaaggtattttggatttccgccaaaaactgacgcccaactagttggtttccattaaaacgtcctgttgtcgtttcatactcgccttggagtacccactcacttgaaattggtgtttgtgccactaacatcggtgccatattaacaatccgatattctgatgtcatctgatcaacgtattgatcgacatccgcttgcgtcgcccaaacgagtccttgatcaactggtaacgtacgtttagtttgtgcaaaccactcactcggtgctaagtgggctgcccctgcttgccatcccaactgcacattagcttggccggggataaaaataaactgctgcccagctagccgggcactgtaagtttgaaatacttgagtgccaatcgttgcggtctcactctgaatcgcttcaattggaatcagcgggctaacaaagtagcgcaacacctggccaaaattagcgcgccgtgcttcttcggataacgataaccagttcagtaattgtaagtcattttcatgcatcacagccacctcgattatgaattaactagctattttgcttcttgttttgacgtttcttttcacgtaattcaagtcgttgttcaatccggcgtttcttttgtgcatcttgtttaatggctgctttaatctttttcttataaccgggtttgcgtttaagtttggcctttttgaccatccctttcatgccgacatctaattcatgcgtggtagctacccgttttttacgacggttccgatcatatgatgtgaccaattcgccatctttaaatgtctttggtgtgaacttgatgcccattgcttcaatttgtgcaacggcttgttcatcatctggaccataaagcgtaatcgcggttcctttaagaccattccgaccagtccgaccaacccggtgaatgaagaattctaaatcttcacgtgggacttcagcattaatgaccatgctaatcccttcgatatcaataccgcgggccgctaaatcagttgccacaacatattgatagtctaagttatgaatttctttcataatccgtttacgttggcgtggtggaatatcgccatgaattttagcgactttcaagccttgtgattgtaaataacggtggatgtcatcaaccttgctcttcgtattagcgaaaaccaagaccatgaaaggatggcccatcgtcaataatgaataaatggtttggttgagggctttccccttcgttggcactaaccagttgtcgattgttgggctaatcacagtttcgtttttaacttcttcaatcacaggattgtgcatgtatttttgtaagaagggttgtaacttatcaggaatggttgctgagaagaccatcatttgtaagtcttctggcaaacgactagcgatgtcatcaactggcttcaaaaagcccatgtcaagtgtcatatccgcttcatcgatgaccaagatcttcgctgtataaatcttaagcgccttgctcttgattaaatctaaaattcgaccaggagtcccaatcacaatctgtggttgatgttgttcgagtttttcgatttggcgttgcttgtcagtcccaccaacataacgaccaatccgaatatcccccgtcatgtgttgagtgattaattcggcagccgtatagatttggtaagccaattcgcgacttggggctgtgatgacgatttgaacttcgtctttttcaggcaccagtttatttaaaaggggtaataagaacgcgtgggttttcccactccccgtttgtgattgaccgataacacttttaccagcgttgatggctggaatcacacgccgttgaaccgccgtgggttttgtaaagtgcatgtcgtctaaagccgcaatgatttcgggttttagattaaattgtgtaaattgattatccataaagtcctgctttctattgtttgaatccggtaaatctggatctgcgtctattcagtgtactgcgcggctagcgctgataattctgcaataattatgtcgatttcagcttgatcagctgccttagcgccactagcgagtggatgaccaccgccatcatgttgcttcgctagttcattaatgattgggccctttgagcggaaatgcacgcggtaagtgtcatctgcttgttgcacgaagatgacccacgttaatacccctttcaaacgaccgggtgttccaacaatcgagtgtacttgttgcggttcaacatgtaaccggtcctgggttgcgcgatcaaccactaagtaggcgacttgttggtcgttcacttgaagttgatcgaataagtacccttgtaatttggcttgttccaacgtgatttcgttcatcttttgattgagcttatcatggtgaatatcaaacgtcatcatttgggcggcacattccatggtatgtggactggttgaattaaacatgaagcgccccgtatcaccaacaatcccggcatataaaacacgcgcagctgcttgattgaattgtaagtggccttcgctgttattgacgatgtcaataatgatttctgaggtacttgaggcatcaggtaacacccagtttaaatccccataaggatcatcgttgggatgatgatcaattttgattaattcagcgcctaagttaaacgtctcaccactaatccgaggtgagttggctgtatcagtcacaatcactaatgcaccttgataagcagccggttcaatttcttgaacgtttgcgagccatgccaagttaccggtgtcgctcccgacttggtaaatcgtcttgtctgggtagctgttacgcagtacttcagctaagccaacttgtgagccaatcgcatcaggatcaggattgatatgacgatggatgataatcgtatcgtaagtttcaattttagcaataatttgttctggagttgtcatttattaacctctttctaagagttgaccagtgacgagggccttagccacaatcacatgattggcgtaaacatcgacatcgattttagctgaacgccgtccaatttcgagcaagcgtggtaaaatctgaatctgcgtgtcgatttgaatcaaccgtaaataatggaggttgatctgttcaatcattgaatagcgctgatgttgcgtctggagcatttgttgacaagctgccgaaaccgcttcggtcagtacaccaaatgaaattgtccctaagttattcgtcatctggggcgtcacttcatattcatatgccgccgtataaaagtctgggacagtttcactaggacgcagtggttcgacaatttgatcataaaacgtctcggcgacttgcggttggcgttgcgccgtttgcatgttgctcatgacatcttgccgggtaattaacccttctagttctaaattgtccgccaccactggcatcacttctaaactattccaagtcattgaatggccgacactggcaacactcatgtattttttaacgctcgcgggttccttggtcatgactttatccaaggtcatcgtggccggtttatctaaaatatccttcaccgtcacaatcccaacgaggcgcatatgttcgttgacgactggaaaacgcgattgttttaccgccgcactcaattgcttgtagtcggctaccgtttgattagcatgtaacgtgtggatttcagcaagtgggtggtagatatcagccaccgttatgatttcttttttaatcaattgatcggtcaacgcccgattaatcaatgccgccaccgaataggtatcgtaggcagtttgcaaaatcggtaaagccaagtcgttggccaatgcaatgacgtccgccgaagtgccaaaaccgccggtaatcaaaacagcggccccgttttcaagtgctaagcgttgcacatccgtccgatcaccaacaatcatcaatgactttggcgtaatgtagcgcgtgatggcatcgatttgcatcgcgccaatcacaaatttgtccaacaacttgtctaaaccagcgcggccaccaaggacctcgccgtcaatcacttgaacgatttcttcaaaggtcagattttcaatcttcccctttaacttctgttcaatgcggatggtaccgacccgttcaattgtgctgaccaggccgttattttctgccgctttaattgcgcgataagccgttccttcacttaccgagagtgttttggcaattgagcgcaccgaaatcttgtcaccaattggtaaattttcgatgtacattaaaatttgatcatgcttagttgccactcaacgccaccaccctttatcagatttacatagttattaatagtatatcggttttagcgcacaaaaacaaaggaaactcaactattcacgctcccaatcgtataacggtaacgtgatgttttcaaatgtttgcggtgccaagttagtcaccgtaatcccgagcaagcgcacgccatcttctgcatggccgatggtttgccaaatttcccaagcgatcgcctcgagttcagctgccttgccgacatattcgttaaatgttttacgcttagtaatagtttcaaattggcgattccgcacttttaaaacaactgtcaaaccgtgtttttgattcttgcgtaaacgccgttcaagttcaatcgctaacttcttcaactcaacttgcacctgctcttcactgattaggggttgcccgtaagtattctcattgccaattgatttgcgttcacgttggtaggcgaccgggcgattatcgatgccgcgcacgtgccgatataagccgtagccaagcttgccgaaattttgcatcagcatcatttctgattgttcaagcaagtccgcccccgttaaaatcccgagttcttgcattcgcggcgccgttttcttaccgaccccacggaatttttcaattggcaagcgacttaaaaaggcaatcgcttgttccggcaaaacgagtgtccgccccgctggcttgcggtaatccgatgccatctttgctaaaaatttattgtacgaaatccccgccgagctgacgagttgggtttctttaaggatttctttttgaatgtaggcgaccacatcaattgtgtgtgccaagccgagtttattttccgtgacatcaaggtacgcttcatcaaaagcaatcggttcaatcttatcggttaccgtatgaaaaatcgtgtgaatctgttccgagaccgattgataaagcggaaaattgggcgccttaaaaacggcttggtgattcggaatcagttcagctgctttttgcgcactcatcgccgagtgcacaccgtattgtcgggcaacatagttcgcggtcgtcacgacccctttgccaccagtatcactcggattacgggcaatcacgagggacttttggcgtaagtcgggctgttcacgctcttcaatcgatgcgtaaaacgcgtccatatcaatgtgaatgattttgcgactcgtatcattttctaatggaatcttgaacagctctgccatgttacccctccttaattttttcaacatgctttttcaggcacattgttccgcttttgacgcacttctttctttaacgtgcttttaattcgtaaccttctgtgctttgctacatcagccaaataatcgcccttggcgcttatccgtctgattaggcaaatgctcaaaggctaaccgcgaattaacgcacttcttcctttaacgtgcttttatcaacaacttcttccgctttacctcacttgccaaatcggcgattccgtcgccaattcgtcaagtactgtaaatgctcagaagttacccgttgatgacgtacttctttcaataagaaaagcctggcatgagcatctcatacacagactttgctgacttgtttaatttaattattttgagtgggatcaaaaatccattcggcccctgttgttgccagtaaatctgttgcttctttaggccccattgaaccgattgagtaacctggtagtggcgtttgatccgcatcccagacttcacgaatcgcatcgacaaattgccatgaagcggctaattcatgccaatgtgtgaagttcgtgccatccccattgagcgcttctaaaatcaaacgttcataagcttctggactgtcagccaacatctgttcatcatattggtaagccaattgatcaggtttcaaggcgaatccttgaccgacttctttaccattaatcgttaatgaaaagccttgttccggttcgacatagattgttaagacatcaggtgccattgctgaacgatctgacttatcatcagcaaaaatattgacgccagtcttcttgaagacgatattgatttgcgtttctttacgtgccaatcgtttaccggtccggacgtaaaatggtacgccacaccaccgttcgttatcaatcatcactttcccagcgacaaatgtttcggtttgtgaatcaggcgcaacgttggtttcttgttgataccccggtttgttttcgccatccaccgatgtttcagcatattgggcgcgcacaaagttttgtttgatttctgctggtgagtaaggttgaatacttctgaaaagacgtgttttttcacgttgcacatcttctgccgtaaagttaaccggcacttccattgcaagcattccgatcacttgcatgatatggttttggaacatatcgcgcaaggcccccgatgtttcgtaatagccagcgcgttcttcaacccctactgattcagccaacgtaatttggacgttatcaatgaattgattattccatacaccactcaatagaccgttcccaaaacgcaaagcaacgatattttgaatcatctctttaccaaggtagtgatcaatccggtagatttggtcttcatcaaaggtttgcgtcaattcttggttaagcgccttagcactttcataatcgcgaccaaatggtttttcgataatcaaccggttaaagccatccgccgttaggagcgcttctgatccgagatgacttgcgattgtcccgaagaaccgtggtgacatggccatgtaataaatccgattttggtgtaattcgtattgttcatccaactgacttgctaaagcctttaatgtttcgtagtgcttggcgtccgtcacatcatgtgattgataatagaaatgacctacgaaagcttctttagttgcttgatcttcatcaaagttgtccaaagctgtcatgacgatttcgtgataatgatcatccgtccatggccgccgtgctgttccaatgacagcgaagtgttcttttaaataacccttccggtataaattaaataatgcggggtataatttccgttgggctaagtccccggaaccaccaaaaataataaagagtgctgctaaatctgtgtgcatatctcacaccactttcatataaattaattttgtggcgtcacaaagatgtgttgtgccgctttgaggccgatttggatttctgtttgactcgtattattaaaaacagtcaacggactttcgaagaggccaaccttttggagcgtcacactgtcaccgactgacaagccgatttccagtgtatattttaataagtcattatcatccaatacgcgatcgataatcgccgtttcacccacttgtaatgtttcaagtgcgatgtgactttgttgttcgaattcccccttggcattgggtataatcccaccatgcgggcaacgcgttggatgccccaagaaatcagctaaccgttcagccaagtcgtgattagtaacatgttcgagttgttctgcttctgggtgcaccgtattgaattgataatgtaacttgtcgactaaaaaaacttcccataaccgatgattgcgcactaatagggctgcttcgcgggcgccttcacttgttagttgaattccttggtaaggtgtgtggttgacgtagttttccttcactaacttattgaccatttccgtgactgatgccgccgaaacgttcaatcccgctagtatttccttattggtaactttctttgcgtcgccaccaagttcaaaaataatttttaaatagtcttctttattgggtgtcattgccatccagatccttaatcaagtttgtcgacaaacttttcttagttatccctgaactaaatgaatgtctactttctattatgccttatttgtaataattttcataccattaagcttcaatttagtcccttaaatagtaaaaaattaatctcttttcagcaacaaaaaaaggcggtagaccgatttgtttcagtctaccgccttaaatttgtggtcgggcttctcaaaccacttattctagcaaatcacttggtcaatttgctagaattctgcttcgagaatccctttcaattctttaattaatggttcttttggattggttaccgtacagttatcttcatatgccagttctgctaaatcatcaacgtggcgatcaaagtcggcctttgtcacgccattatcacgtaaacgcatcttgatgccgatactttccgccaatgcagtcacagcatctgcgtaagcggccaccagttcttcagtcgttttacctggtaaaccgagataacgtgcaatttcagcataatcttcatctgctctgaagtaactgtatttagcccagagtgcccgtttcgttggtgtcttagcattatagcgaatgacatgcggcattgtaatggcaatcatcaatccgtgcggcaaattgaacgcgccgcccagtttgtgcgccagtgaatggttgatacctaatagcgcattggcaaacgccattcccgccattgttgacgcatcatgcatattggctttagctgtcttatcgcccgcataactcgcttgtaagttatcaaacactaatttaatggcttgcaaactgagcccttttgtataatttgacgccatcgctgatacgtaactttcagtcgcgtggcataaaacgtccatcccagtatgcgcaaccacgcggggtggcacactttcgatgaattgactatccacaattgccacatctggtgttaacgcataatctgccaatggatatttgatgtgcgtttcactatcagtaatgaccgcaaacggcgttacttcagaacccgttccagaagtggttgggatacagattagtttcgtccgatcgaggtttgggaacttgtaagtccgtttccgaatatctaagaatttttgcttagcgccaaagaagtcggcatcttctgaatcatagaataaccacatccctttggccgcatccatgactgagcccccaccaatagcaacaattgtatcgggtttgaagcgtttcatcacttcggcgcctttataaatggtatcggttgatggatctggctcgacatcggcaaatacttggacctgcacttgatctgtgcggcgcgccaagacgtcttcaacaatttgcacgtaacctaagtcgaccatcccttgatcagcgacgataaaaaccttatgcaagtccgccattttttctaaatagttgactgaatttttttcaaaatagattttgctgggcaacttcacccattgcatgttattccggcgcttggttagcgtcttcacgttcaacaaatcgatcgttgaaacgttgtgggagattgagttatggccgtatgacccacagcctaaggttaatgatggtaacatgtcattgtataaatcaccaatcccaccttgtgctgatggtgtattcactaagacccggcatgctttcatccgttttgcaaattcgagtggtaaagcttcatccgttgtatgcaacgaagccgtatgcccaagaccaccaagatctagcattgcttcacagagttgcaagccatcttcgcgatctttagctttaatcatcgcaagtacgggtgataatttttcatgtgagagtggatattggtgtccaacacctttaatttcagcaattaaaactggcgtatcttctggaatatcgatcccagctagtttggcaattttagcagcagattggcctggaattgaaggtcggaccgcattcttatctgggtcgattactgcgtcattgagtgctgataattcgcttggtttagcgaagtaaaccccttgtgcttggaattccttcttcactgccgtataaatttcagcatcaacaattacggcttgttcagaagcacaaatcatcccgttatcaaatgatttcgagaggattaaatcattgacggcttgtttgatgttcgccgaagcttcgatatacgctggcgcattcccagccccaacccccagtgcgggtttaccagttgaataagcggctttcaccatcccaggaccaccagttgctaaaacagttgcgaccccttcatggttcattaaagcctgggtagctgcaatacttggttcttcgatatataagagtgcatctgctggcataccggctttaacccctgcagctttaatgacattcaatgcttcagccgaacaacgttgcgcactaggatggaaagcaaagatgattggattccgcgttttaatcgcgatctcagctttaaaaatcgtcgtcgaggttggattcgtgactggcgttacaccagcaatgacaccaacgggttctgcaatcttagtgatgccatgttctggatcttcttcaatcacaccaactgttttattgtctttaatcgcattccaaatttcctcggttgcaaaaatattcttgatggctttatcttcataaatcccacggccagtttcttcaaccgccatcttagcgagtgtcatatgttggtctaacccagcaatcgccatttgatggacaatattatcaatcttggcttgatcgaatgtttccaaaattgctaatgcccgttgtgcacgcgtcactaaatcggtgaccatttcattcactgtgttttcaaccgtttcaactgctgctttcttaaccatatcgattccctccatgccaattaactattgtgatttatttaacaaagttagtttagcgcattttgagttgtttgtaaactgttttgtgattataattacaaattttatttcttagttaaaggcgatttatcttttaaaagcctacatttgataataaatttactatataatgcaaataaaaaagcgctcggttgaagtattcaatcgagcgctctctgaattattttgtatcttcttttgtttcttcaaccgtttcttcttcaaccactgttgcggcttctgaagcagttggtgttactgtccggattgcgctcaagttaaacttgaggtaaacgccgtcacaatctaagacaacgattttagtatctgtattaacagaatcaatcacaccgtgtaaaccaccgattgtgatgactgcgtcgccttttttcatttggttcaccatttcttggtgtttttgttgttgtttcttttgtgggcgcattaccatgaaatacatcattgccatcattaaaattaagataacgaagaaactgggattaaaaccgccggcacctaacacaaagtttgccatttaaaaaacctcttttcaattttgtctattactaactctatcagacttatcaagcaacttccagtgattcactagaaattccgagtgttcttttcattgtaaccatattcttcgaagaacgcttctctgaattccaataaattatcttgttcgatggcatcttgcacttgatgcatcaaattaatcaagaagtataagttatggtaactcgttaaatgaatcccaaacgtttcgtccgctttaatcaagtggcgaatgtaagcgcgggtgtagttcttgcagacataacaatcacacttaggatccagtgggcggaagtcttctgagtacttcgcattcttaaccactaatcggccttgtgaggtcattgttgtcccattacgggcaatccgggttggcaacacgcaatcgaacatatcgacaccgcgaatcacaccatcgattaaggcatcaggcgaaccgacgcccatcaagtaccgtggtttgtcttcaggcaacattggtgttgtgaaatcaagcacgcgattcatttcgccttttgattcaccaactgataagccaccgattgaataaccggggaagtccatcccaactaaatcgcgcgcactttggcggcgtaagtcttcaaagccggccccttggacaatcccaaatagaccttgtgttgctgggttttgatgcgcaatcaagccccgttcagcccaacgtgatgtccgttcaactgattttttaacgtagtcataactttcaaagaatggtggacattcatcgaaactcatcatgatatcggcacccaaagcattttcgacttggattgctttttcaggagataagaacagtttttcgccgctcaaatgactcttgaaggcaacaccgtcttcactgatatcccgtaatttcgcaagtgagaacacttggaaaccaccagaatcggttaacacaccgcgatcccagttcatgaacttatgaagaccaccggctttttcaacgatgtcttccccaggtcgtaaccagagatgataggtgttcgataaaataatgccggcacccatttcttttaattcttcaggcgccattgtcttaacactggcttgggtcccaactggcataaacatgggtgttttaaacgtgccatgtggtgtcacaatttcaccaaggcgcgccctggtatgtttttctttcttgattaaacgatacttgatcgctggttccatttaatcgactccaattctaggattattgttggttcagtaataattggtacgcatagcgtttcggtgacggaccgtttgcaatgaagatgtcaccacgatattgaaagcctactttttgaatcatatgttgcatcgccaagttatcagggtgcgtatcgatgcgtaaatcatgtgcgcctcgtaaactggcagcggtcaccaataaggttaaaaactgtgtaccgagatgttggccgtggaaggcactatcgagtgcgacacggtgaattgaaaaataaggtgtcgaaccagattgccattgaccattggtaattgctgcatagccaggatcttcagttgctagaattgaggcgaccccaatcacctgttggtcagccatcagaatgtaacataattcttggcgaatctcgtcttcaaactgagtttgattaggttcacctgcttgccattgatttatttggcgatcctttaaggcggcctttgcatgttcgataatctctaaaatccgcggtaaatctgtaaacgttgcttttctcaaatacatcaatgctgccacctcatttttgtcgaattatttaacaaacatggcatcgccgaagctaaagaaacgataccgttcatcaacagcgtgttgataagcatttaagatgttttcgcgaccggtaaatgaagcgaccaacatcactaaggttgattttggtaaatggaagttcgtgatgaatgcatcaacagctttccattgataaccaggtttgataaagattgatgtccagccactatcagctttgagttcaccatcaaacttcgtcgcaattgtttctagcgtccgaatgctggttgtccccgttgccacgatgcggccaccgttttgtttaacttcattcaacgttgcagcagcttcttctgttaaacggtagaattcgctgtgcattttgtgatcttccacgttgtcttctgaaacaggccggaaagttcccaacccaacatgcaacgttaagtacacgagtttgatgcctttatcttgcaccttttgcaagagttcttctgtccagtggaagccagcagttggtgcggcagctgaacctggttctttagcataaacggtttgatacatttctggatcgtctaatttttctttgatgtatggtggtagaggcatttcgcctaaggcttctagaatttgcatgaagatgccatcatacttaaattcgatcatgcggccaccgtgttcgagttccttggtcacaactgcttttaattgaccatcaccaaaaacgacttcggtgccgactttggcccggcgtgctggcttcatcaaaacttcccattcatcgtcatgcgtgttgtttaaaagcaagacttcttcgtggccacccgtatccggtttgacaccgtataaacgtgctggcaagacccgcgtattgttcatgacaactgcatcgccgggatttaattcatcgataatgtcgtagaaaactttatcttctagtgcgcctgttttgtgatccatcaccaataaacgagacgctgcccgttcaatcatcggtgtttgagcaattaattcttctggtaaattataatcaaaatcttctgttgaaaccattgtgtaacctctttctaattttctgaatagggaatgccgagatgttcataaccagcgggcgtcacaacacgtccccgcggtgtccgttttaagaacccaatctgtaataaatacggttcgtaaacggcttcgattgtttcattttcttcaccaatattagccgcaatcgtctttagaccgactgggccgccatgataatagtcaatcatcatctggagaatcttgcgatcaatactatctaagccacgtacatcgacttgtagttgactaagcgcatggtcggtaatcgcttgatcaattgccgcttggtccgccacttgagcgtaatcgcgaatccgttttaataagcggttcgcaatccgcggcgtcccccgcgaacgacgggcaatctcatgcgcgccttcttggacaatggccatgttaaagacatctgccgagcgttcaatgatatcgaccaaatcatcttcatcatagtatgccatatgttcgacgattccgaaacgatcacgtaacggtgccgacaataaaccggcccgagtcgttgcgccaatcaaagtaaacggtggcaatgggaaatgcaacgggtgcgcagttggcccttgtccgaccacgatatcgatgtaaaaatcttccatcgccgaataaagtagttcttcgaccactctcggcaggcgatgaatttcatcgataaatagcacatcaccaggttgtaactcgttcaacaacgcgactaaatcgccaggccgttcaattgctggcccactcgtcgtccgaatctgaacatgcagttcattggcaatcaccatcgccaaggtcgtcttacctaaaccaggcgggccatataatagcacatggtccaacgactcttcccgctttttagcggcttcaatataaaccgccaactcatttttgacccggtcttgaccgatatattgcgcgaggacttgtggccgtaacgtcttttcaatacttgtttctgcgaaatcttcgttttctgcggaaacaattcgttcttctgccatccattagtcctcctttatttcttcattaataagcgtaaaccttcacgtaagtactgatccgtagtttgtgcattgaaatcagccagtgttttggtaatcgctttgacttcgcgggctgaatacccaagcgcggttaacgccgctaacgcatcgtttaattctggtgattcaccaggcgtaccaagatcgatagccgtttgaccagcgagcgtttcggtttgttccaaatcaccgagcttgccctttaaatctaagacaatttgttgggcagtcttcttgccaaccccagggaacttggtcaaatagctcacatcatcattcataatcgcttggattaacccagaatgatcgctattggctaagatggccaaggcactcttaggaccaattccagaaacactgattaatttttggaaaatttgcttttcatctagatcgtaaaaaccaaataacgtgatatccgtatcacgaaccgcttgatagacataaatctgaacgatatcggtcgttgattcggtgtaacgatacggattagcaacttgcaattgatagccgacgccttgaacttctaagacgacatagtacggactaaccgccgtcaccaaaccttttaaatattcatacataaatttacctactttacgagaacgtatatttgcttgttaaattgtaacataaaatccgaatcgtgaaacagccagcagccaaaaagcgtaaaagaagggcctaagtgacccccggccaactcaaaccctagcaattagtattcacgaatcttcggcggttggtaatccttgataaaggatgccatcacactgaacgaatcggtaaataagtatttttcaaaatcgacctgtgttaaaaaaccttcactgaccatgtgggctaaaaattgttgtaacaaatcataatagcctgcgacattataaaaaatgcagggaccattttgttgcccaattcgcgcccatgaaataacttcactcatttcttccagcgtaccgggaccacccggcaatgcgataaacacatctgccagttcaatcatcttggctttacgcgctgacatcgtatcaaccttaatcatttcggttaaacctggatggacgagttcttgctgactcataaaccctggcatgacgccggtcacttgtccatcatgggctaacaccgtgtcggccacggtgcccattaaaccaacttgggcgccgccataaatcaagcgcgcattgcgcccagcaatccaagtgcctaacgccttagccgcttccgtgtagattattttattaccactactagcgccgcaataaacggcaatgttttgcgttgccattagtcagcctccttagcggttaacaaccgagccaccgtactgatgggcaagccaacaacattgtaaaagtcaccgttgattttctcaacgagcagacttccctgtccctgaataccataagcaccagccttatcccggtactcttcggtgtctaaatacgtttcaatcatttcatgacttaacggccagaacgtgacatcagtttggacaaccattttgcggatttcaccatcaatggataaccaaacacctgtataagcttgatgcgtgctgccactcaattgccgtaacatttcggctgcatcttgacgatcatgtggcttaccgtaaatcgtgccctgaaaactgacaacagtatcagcactgagcacagtggcctgaggattcttttgggcgatggattcacccttaagttgcgccaacatctgcacgtagtcagctggtgccgtcactggtacctggcgttcatcgattgttgcgggttggacttcgaaatcaggcacgactttttgtaaaagttcgcggcgtcttggtgattgtgatgctaagataaacattattcgccctcccaactatggtgtggatcttgaatccgtttaaacattttttctaaatctttttgcgtgtaatggattaaaaccggtcggccatgtggacagttaaacggattttccgtctgtgccagatcaaccaacaatgctttagcttgcgcatcatctaagtgatggtgtgccttgattgactgtttacagctgatcataatcgccgttttttcacggaaatgggcaatgtctaacttcccgttttccaatacagtgtcaatcatctcgcgaatcgttgcttcttcttggccttgcgcaatccacgtcggatgactatggataacaaaactattttggccgaagctctctagctgcacacccactgcggcaaggagttccttttgtgcttgaatcttaatcgcatcactattgggatattccaacacaaggggcaccaataaattctgggcgtcgttgctaacttcaccaattttttcgcgatagtattcatacttaatccgttcttgagcagcatgttgatctaagatgtaaaagccatcttcaccttctgctaataagaatgtattgtgcagttgtccaatatagcgtaacgctgggaaacgctcaatgggtgctgcatcatcttcaggttgttcaccaaacggatttccgatcgcctctgcttcgtacttatcatcccaccgggccaattgttggggttgttcaaatatcggcaggctatttaaattaggattagcagttggttctcgtttaaggggtgtttcggtttccgcaatttgctctgccgcttgcatttcagttttaaccggcttttcaggaactgtttggggctgaattggccgcaccgtaccagtcgcattgcgccgttgactcgtaatttggtttaaatccatttgaagctggtccacatcgaccggtttcgtttgttttagattctgcactgcatcgggaattaaattctcggtgctgagtcgctcacgaattgctttttcaatcaacgccatcaaagcaggttccttactcaagcggacttcttgcttggtcggatggacattgacatcgattaacagtggatccatttgaatatttaaaacgacgactggataacggccgaccattaattttgaaccgtaacccttgataatcgccttattcaattgataattcttgatataacgaccattaatcaacactgaaatgtaattacgactggcccgcgttagtttcggtagcgatacatagccggttaatttaaaatcgagatcttctgcactgactggcaagagttgcttagccattgtaacgccatagatcccggcaatcgtctgttgtaaatcgttattacccgccgtttttaacagcaggtgatcatcattggttaacgtgaacgcaatctgaggatgactcatcgccaagcgattgacgatatcgatcacgtttgccaattcagtctggaacgtcttcacatatttcaagcgggctggcgtgttgaagaataaatcacgaaccgtgattgccgtcccagggcgaattggattagttttctgttcttctaagacgccacctttaaaatgagcaaatgtccctaacgaatcagcggttgccgtttcaatcgtcaaatcggacactgacgcgatactggctaacgcttcaccccgaaagccaagtgactgaattttgaaaagatcctggcgcgtggcaatcttacttgtcgcgtgtcgcttaaatgcagtgggtacatcttccggttcaatcccatcgccgttatcgatgacttgaatcaattgcaaaccagcctgttcaatcacgatgtcaatttgagtactattggcgtcaatcgcattttctgccaactctttgacaactgaagctggccgctcaattacttcgcccgccgcaatttggttacttaatatttctgacagttcatgaattttccccattagcgttctcctttttctgacgtgtgggtatttagtgctaaaacgtgcttttcaagctaactttctgcgcttagcactgtgaatcaaatcatcgactgcgtcgctaattcgcttccctgtgctaatgctcaaaagttggacaagcttgaatacactcttatccgaaacgtgctttcatcaacaacttcttccgctttaccccacttgccaaatcggcgattacatcgccaattcgtcaagtgctgtaaatgctcagaagttacccgttgatgacgcactcttatttgtttaattccttttgccatttgtatagcatgtttagcgcgtctagtggtgtggcgctcattaagtcgaattgtttaaccgccgctaggactttagctgcttttggatccgcttgtggtgccacttctggttcgaatagtgaaatttgttcatccacttcttcaaccggttcagcagccggcgcgacagctgcctttggtttatcttctaattgatccaagatgacatctgcgcggttcaacaacggtgtcggcatccccgctaatttagccacgtgaatcccgtatgacttatcagctgggccagccagcatcttgtgtaaaaagactaactcgccattttcttcaactgccccgacgtggacgtttttcaatgcggttagtgaatccgctaagctggtcaattcgtgataatgcgttgaaaagagtgtcttggcatgcacgttgtcgtgaatgtattcaataatcgcttgggccaaggccattccatcataggtggctgttccgcgtccgatttcgtcaaagagaatcaagctattttgtgtcgcgttcataatcgcgcgattggcttccatcatttcgaccatgaaggtactttgaccggaaattaaatcatcggccgcaccaatgcgcgtaaagatctgatcaaaaatcggtaagttcgcagatttagccggtacaaaacatcccatctgcgccatgatgaccgtcaaagccagttgccgcatgtacgtactcttcccagacatattcggaccagtaattaagagcatatccgtatcggtgcccatttgaaccgcattgggaatgtatttttggcgaccgagcactttttcaaccactggatgacgcccatccactaaatcaatttcgcgactatcagtcattaatgtcggctgaacgtagtggtagttttcactgactacggcaaaactttgtaagacatcaagggccgccacacttttagcgagggtttgaagccgttcaatctccaacttaacggtttcgcgaacttgcgtgaataactcatattcaagcgcggttgagcgttcttcggcttctaaaatcaattgttctttcgcctttaattccggtgtaatgaaccgttcggcgttggttaaggtttgtttccgttcataacgcccttcaggtagcgcgtctaaattcgcacgtgtcacttcgatatagtaaccaaacacgcgattaaagccaatttttaaattatgaatcccggtaatttcgcgttctttagcttcaagttgtgctaaccattgtttcccgttagacatcgcatcgcgataatcatctaatgtttcgttgtaacccgattgaataatcccaccgtcagtcactgaaattggcgcatcgggattgatggccgtttcaatgagctcgcgtacatcatcaaccggatcgagttggtctaacgcacggtcaaaggtctgatcgtcattaatgcccgttaaaatcgttttaatcgttggaatttgttccaaggaagtcttcaactgaattaaatcgcggccattaacactgccaaatgcgacccgacctgctagccgttctaggtcatacacttttgtgagggcgtcttgcaagtttgtccgttcaaaataatggttcatgaaactagcgacttggcgttgccggttttgaatcgcctttaaatccaataatggccgttctaaccattgttttaataaccggccacccattgccgtcttggtttcatccaataaccacaataatgtcccgctcttatgaccagtgcgtaaagaagccgttaattcaaggttcatcttcgcagaatggtctaattttaaatattgggatggctcgtactcttgggcccgttgtaaatgccctaaatggcgcttttgcgtcgttgccaaatacaagaccaattgtttaatcacggccagttcaaggggctgggagatgttttgtgaaacgaaactgacttcggccgttgcatcgccatcttcttgatacgacacgagaatttgttgttgaacaaacgcgtgcacaacctcactggcaacaccgtggttaatgacaacttctttggtttgtaaactcaacatttcgttgagcaataaatccaaactcgcaatctggctgactttcatctcaccagttgataaatcggtataagcaaagccaaactgatcgccatctgccaccactgctgttaagtaattattttgtttggcatgaccggctttttcatccatcatcgttcctggtgtgaccagttgaatgacttcccgcttgaccatccctttagcggttttaggatcttccatttgttcacaaatagcaaccttgtaaccttgatcgactagaatatcgatgtaattttgggctgcgtggtgtggtaccccacacattggaattggatcatccgcatttttattgcgtgctgttagtgtgagttccaataattgtgaagctttgacagcatcatcattaaagagttcgtaaaaatcaccgaggcgataaaataaaaaagcgtccggatactgatccttgaccttttgatattgcgccatcattggcgtttctttcgttttttgtggcatgttgttaatccctctctcattgacgttgatctgctgctaaggtgcttaaaattgcgtataggggtgatctggtgaaatctggatcggtttaattgatttagcgtgacccgttttgtcatcaatttcaattaaacagccattcaattgacccggtccttcggtcactaattcaaaccgttctggccgttgtgttttaaaccgattaatgatcttttcgcgcttcacgcctagaatcccgttataagggccagtcatcccagcatccgttaaaacggctgtgccttcaggtaagacgcgcgcatcgtttgtttgcacatgtgtatgggtcccaactaacgctgaaatccggccatcaagataccaagcaagtgcgagtttttcactcgtcgtttcggcatgaaaatcaacgaagatacagttggtttctttactaatttcagccaccatttcatctaacatttcaaacggatcaattagtagttcattcatcaaggcgcgcccttgtaagttaatcacggctaatttggcttgattgacgttaatcattgtcatcccttgcccaggcgttcctttcggaaaattggccggccgcactaattttttagcatcgtcgatgaattctaaaatatcgcgcttattccaagtatgattgcccatcgtaatcgcatcggccccagcttgtaaaagattcttataatccttttgagtcatccccttaccatccgcgatgttttcgccgttgataatggtcacctgtggtttgtattgttgctttaatgctggtaggtaatcattgatcattttttgacccattgtgcccactgtatcaccaataaataaaattcgcatgttgcgccccttaatgttctttctcagactttgatatagcttctattgtagcaatttttgcccagaataaaaagttttgctgtacccgtagaaaaacaaaaaaagccccgcgcaccgaaaaggtgagcggggctgataatgtgcttttcaaaccatgttcctgcgtttagcctaattagccaaccaatcgacttcgtcgcttattcgtctaattttgctaatcctcagaacataatcggtttgaacacacttcttcttttaacgtgctttttgaaactgactcttgcgcttagctacaatttgcaaacgatcaactccgtcgctcattcacagatttaggctaatgctcaaagtcaaaccgtttcaaacacacttctcttctaacgtgcttttagttgcaccaacttccgcttaatctaaaattggcagtcatcccacaactcgggataactgccaattttgtgttaatgctcggttgctaaacgcacttctttctttaacgcgctcctcgatcagtcttttccggttaactgcaaaatgagcatcatggcaagaaccgccacaatgcccattttactgttaatcctcaaagcctactcagatcgagtcgcacttctagtgttttaagtgataactatatgttgaaataataatgttttcgcggtttgcaaatgccgttcttagtcttagacttgattggttatgcaaaatgttttgccatggttttcttggtacgaattgtgggaccaagaccgtggttgtaaagttccgtttttgcgcattcttgctaacaatgtcaacaaagcgaacaattggtttttgaattgaccggtatgatgaatggacatcgacgaaccggacattcggaaaatcttccttgaattcagcttgaatttcacgttccttggctggattttcatccgttgagacatgcatcgcaatcacataatccccgattgattgtgcgtaatctagcgcaccacgggttacttgggtcacgttgctgaccaagacaatcacagttgaaccgtcataatcatgcaagacggcttctttagcactcacgcgtagttgaagcgccactttcttgtaatgatcatgaatcttatagaaaatccaaatcataacaggcatgatgatgaagaatggccagatatcaggtaagcgataaacgaagagaatgactaagatagcaaacgaaatcaaagcgccaacaaaattggcaattgatttaccaaaccaattctttggtcgttcgacccaccacttgcgcaacatcccagattgagaaagcgtaaatggaatgaacacaccaaccgcataaagtggaatcaagcgtgatgtatccccgttaaagatgaaaatcaatgccattgaaccaatcgccaatgtaataatcccgtttgaataacctaaacgatcgccacgatccatgtacatgtgtggcatatatttgtctttggctaaattatacgctaacactggaaaagcggagaatccagtattcgcagcgacggctaaaataaaggccgttgcaaattgcacaatatagaataaaaagcctttcccaaaggtgtgttgggccacttgtgatagaacagttactttttctgctggtacaatgccgtaccagtagtttaaaaatgtaatcccagcaaagaagaaacctaagatggctgccatgattgctaatgtttcagccgcgtttgttgcacgtggcttcttgaaaaatggtaccgcattactgatggcttcaaccccagttaatgatgatgaacctgatgagaaggctctaaaaatcaacgccatcgaaacacctggtacaacagccccaacggttgatgttgcgtggaacggaatcgcacctgtgaagatcttataacacccaacgatgatcattaaagtcatcatcaagacgaataagtaaacgggcaccattaaaaatgatgctgattcacgcatcccacgtagattcattcccatcaagatcaaaacgataatgaaggaaatccctacttgatgcccatacaatgccggaatggccgaggtgatcgcttccgcacccgcggaaatactaaccgcaacggttaacatgtaatccacaagcagtgaaccacctgccactaaaccagcatttttccccaaattttcactggaaacaacgtaggcgccaccaccacctggataggcgtggatcacttggcgatatgacaaagttaatgacaatagcaatacgagcacaaaggctgcgattggaattgaataccaaattgccgcggccgaaagggtcgtcaatacgatgacgatttcttctgtcccgtaggccactgatgacaatgcatcagaagatagcatcgctaacgctttaaagcgtcctaatttttgattaccctcatcggaagattttaacggtttcccgataaaaatccgttttaactgttgcatagcaatatgacccctttaaataatatttctaacataaaaagccctcatgtgaatatcattcgtcgcaatccacacagtgacttttgaatttctctataacttaaaaaaataattgccgtttattcaaacaaatcgtattctactatagttacgcatgaattactaccacaatttaaaaaagaactgaccaaggtaatcgaaacgcctcgattccttggtcagttcttattttttatgataaacgacgggcaaaatctggtttgtaatctgaaattttagtaattcgaactttatcgccaggttgtggtgcttggataaagtagccatccccaatgtagattgcgacatggtgggctgttccaacccctccccagaataataggtcgtttggttgtaattcattgagcggtacatctttgcctaacttactttgatcttgtgaaacacggggtaatttaatcccatttttagcgtaaacgtattgcactaagccagaacagtcaaatccttcgggtgtggtgccaccccaaacatagggtcgcctaaatatttaaccgcttcttggataatcttattattcattaaatccttgttaccagtaattaatgcggcacctgcatcactcgccgctttttgagcagccgcttgcgcctctaattctttcttgaacttcgtttgtagttgcgttaattggtcgttagcttgttgtttttgttgatttaagtccttaattgcagcatcattttcctgtgataatgataccagcttggcctgttgcgcttctaattcagtcttttgttcagctttttttcagctaatgaggccgtttcagcggcattatccgccttagcgtctaacagtcgattgatgattgaacctttttggaataaatcgctcaaactttggctcgacaataaactatcgatcatatcaagattaaaactgctatctcgtgtttgtaattgccgcagattaccttcaataatcgccacttgcttttgataatcagcagatgttttgctgaactcgtcttgtttttctttaatatccgcctgttttgcagtcatttgttcgttcaattgcgttgtttttaacgttaaattactaatattattattcaattcggatagatgatcttgtgctgtcttaatggcagtttgcgtttcttcaggcgttgcttggaccgtttgtggtcgcgctaaaaagaagccacctaacattaaacaggttatcagtatccgccggtttcgaaaaatcattgtcaacacctccaactattattataccgcaatcaaaattaattaatagggttgcgcacaatttatatatgcgcattttttttgaaaaggcagattgcaagaaataacttgaacgaatttaatgacgtaaattaagcaagaagatctcgattggtgtatgccaattaagacatttaagtggccgtgaattcaaataccaattaatttgaaccaattggtgatcacttagttcttcaatggcttggcctttgggaataaagcgccgcaaaactcggttacggttctcattactgcctctttcatgcggtgaataggcatgggcaaaataaacctgtgtaccagttcgccgttcaattgtctgatagttagcgaactctttaccatgatctacggtaagcgtcttgagcttgtcttgaagttgactagctagttcaagtacggcttgagtcatggactgactgtcgcgaccatggagccgtttaacaattgtcaggcgactcttacgctccacaaaagtagccacagcttgacctttacgtttaccagaaagtacggtatcagcttcaaagtggccgaattcctggcgagtttcgactttatgaggccgctcctcaatggagcggccgtgattgaacgtaccacgcttttctttagcacgatgacgacgaattccatgatcaggcaaatcgggcaactgtatatcaagccatccttgatcaatccagttatagaccgtcttgtaggcaatccccaccacatgggcaacttgttcaggggaccacttctggacttgaatcttttcctcgatcaagtgtttaaggtttttagtgagcgaagacttccgcccccgttgactaacctttcgttcaaagtcagtttgcgctagcccagcctggtactcactatttagccggtgaagttcgttaaagatggtggtcttactaaagcctaagtagttagcgatgtatcgcaaggaacgtccttcattatgaagcgtttcaatgacaacacggttctggaatgataaaatagtggtgctcatcaaggtccttctttctaatggattgtgtggtaacaccattaaagaccttgatgggtttttctgtccacttaaatgttcaacttaaattttacaatctgccaaaaataaaaaagttccaaaacttttgccagttttggaactttggatttaatcgtgctttttggttataacgccttccgcttaactacaaaacgagcgttatggcaaaaaccgccataacgctcgtttttaggttaatgctcagaaccaacccgtttcaaacgcacttctttacatcataccgcccattgctgatgggtccatgcctgctgctggtgctgggttgtcttctggtttgtcagcaaccactgcttcagttgttaacattaaggccgccacactagctgcattttgtaatgctgaacgtgtcaccttagttggatctaagatgccggcttcaatcatattttcccagttgccgttggctgcattgtagccgacttcaactggttgtgatttaactttttcaacaattactgagccttcaagaccagcgttggttgcaatttgacgaacaggttcttccaatgcacgaagcacaatgttaatcccggtttgaacgtcgccttcttctttaagcgcagcaacactttcgatcacatcgattaatgctgtcccaccgccggcaacgtagccttcttcaacagctgcacgcgttgcgttcaaagcatcttcaatccgatatttttgttctttcaattctgtttctgtggcagcaccgactttaatcactgcaacgccaccagctaatttagccaagcgttcttgtaatttttcacggtcaaagtctgatgttgtttcagcaatttgtttcttgatgttttcaacccgttcagcgatggcatctttgctaccagcaccttcaacgattgttgtatcatcttttgtaacagttaccttaccagctgtccctaattgatcgatagttgtttctttcaattctagaccgaggtcacttgtaatcactgtggcacctgttaatgtggcgatatcttctaattgttccttacgacgatcaccaaaaccaggggcttttacagcaaccacgttgaatgtcccacgaatcttgttcaagacaagtgttggtaatgcttcgccatcaacatcatcagcgatgattaacaaggctttaccttcttgcacgattgattgtaaaagtggtaaaacatcttgaatatttgaaatctttttatctgtaattaagatatatgggttatctaggtcagcttccatcttatcgttatccgttaccatgtattgtgacaagtaaccacgatcgaattgcatcccttcaacaacgcttaattcagtatcaatcccttttgattcttcaactgtgatgaccccatcgttgccaactttttccattgcatcagcaattaaacgaccagtttcttcgttagctgatgaaacagcagccacttgggcaatggcatctttactttcgactttgtgtgaaatttcgtgtaacttcttaacagcttctttagttgctaattcaatcccacgacgaatcccaactgggttagcgccggctgtgacgttcttcatcccttcacgaataattgcttgagctaaaacagtagcagtagttgtcccatcaccagcgatgtcattcgtttttgaagccacttcagaaactaacttagcacccatattttcaaaatgatcttctaattcgattgctttagcaattgtcacaccatcattagtaatttctggtgaaccgtaagctttttccaaaacaacgttccggccttttggtcctaatgttgttttcactgtgttggctaattggtcaacccctgccaacatttttgaacgtgcgtcttctgaaaatttaagttcttttgccataatttattcacctcaaaaaatttttttgtttattattattcaacaatagccataatatctttagcatggagcactaaatattgttgaccttcatattcaacttctgaacctgcatatttatcgtaaataacttcatcgttttctttaatatcaagtggaattcgtttgccgtcacttgttaatgtgccggtaccaactgcgactactttaccggtttgtggtttttgtttagcattacttgccaaaacaatcccacctactgtttgttcttcttcgtctttaacggcgataatcacgcgatcttctaatggttttaacacttaaaatccctccatcaattttacttttttagcactctatcatctcaagtgctaatcacaatttttatcatagcattttttcagaacattgcaagtattatgctagcacttttgcaatttgaatgctaatacgctaagctattgtcacaacaacctttgaggagctttcacatgacgctatacaaacaaaatttttcaattatcattagctatttgttcattttattgattcctagtgcagtcgtccgttttggtcatctatctgcctcgttttttctaatcacaaccattgttgattgcctcggtgccgcctggttactctatcttaatcaacgcacacaagccaatgccattgagcagcggcctttcccactcaaacccattatcatttgggggttgtgtggcattgtactggtcttagtaattcagattctcgccggcttcattgaacaaaacattctccacatcactgccaaatcgctcaacaccatttcactgatgaccatgatgcaacaacaaccgtttcttattttagcaacgaccatcgccgcaccgattatggaagaaatcacgtttcgcaaagcaatctttggtggattagccagtcgcttaaaccgcattttagccgccatcatttcaagtttactgtttgcttttttacatcaggacgggcatttgttaatctacacggccatcggtcttttcctatgttggctgtaccgcaagacaggttcgattttcaccacaatcatcagccatgctgggatgaacctgatcgtcactttactgtatctcaatcgttaaaaaaagcgttcaaacaggcggctactacgagcaacttgtttaaacgctatttttattcttgattttgttcatcagtataattatcgaggaagtaaatcaaagtttgtagttctttagccaaatcaacattttgaatccgcacgtttgatggcacagaaattcgaattggcgtaaagttcataatccctttaatcccagcggccactaattcatcggtgacttcttgagcttcatcaattggcactgttaaaatgacaatctcgatctgttggttcttcaattgttcggccatctcgtccattgaatagacaggaacaccggtttgaattgttccaatcatttcgggtttaacatcaaatgctgcgctaatccgaatattattggtttgcttaaagttgtagttcaataaggcgtggcctaaattccccaccccaatcaatgcaacgtttgtcaatcgatcttggttcaaggtcttcttgaaaaaatctagcaacgaagcgacatcatagccataaccacgtttgcccagtgcaccgaaatatgaaaaatcacgacgaattgtcgcactatctactttaactgcttcagataatccagtagaggaaattttagttttccctgaattgttcaaaaagtttaaatagcggtaatataaaggcaatcgttttgcagttgctcttgggatattattctcaaccatttgaaacctcctttttgatttgcttgtgaaaatagtgtagtaccatactgaaatcatactgaattttcttgtgaaaagcaatatatttacaattttgactgtccatcgtttaaatctgttatgatagttgacagtagtattataaaaatgaacgcaattaactttaaaaaacaccgcacgaaaggatttttagccgtgatattattacaagttcaacaagtcgcacgcagttttggcggcgattaccttttcaaaaacgcacaactcgaagtacaagaccgcgcccgtgttgccctcgttggtccaaacggggctggtaaatcaaccttattaaaaatgattgccggcatcacaacgcctgatgaaggccaaatcattcttagcaaaaatgctcaagtcggttacttagcgcaagatagtggcttagactcaacccggacaatctatgcggagatgttaaccattttcgatgatctccgccaaatggaagcccaaatgcatgaactcgagaccgcaattgcggacacaaccattgaccatgctagcgaagaatatgcagccttactaaaacgatatgaccaagtccaacacgatttctctgaagctaatggttacggctatgaagccgaaatccgtggcgtcttacatggtttccaatttccagaagacacctttgaaaagccaatcagtacactatcgggaggcgaacgctcgcgactcgcacttgctaagttattgcttgagaaaaaagacgtccttattttggacgaaccaacgaaccatttagatatcgaaacactaacatggttggaaaattatttacaaacttatcccggtgccttgctcaccgtctcgcatgaccggtacttcttagataaaatcactaaagaagtctacgacatgagtcgccacacattgacccattataccggtaattacagccatttcttaagtttaaaagaagctaacctctcactcgaatggaaggcttatgaaaaacaacaagctgaaatcgataaacttcagacctttgttgataaaaacttagtgcgcgcaagtaccacgaaacaagcccaaagtcgccgccgtcaactcgaaaagatggataaattagaccggccgcaaaacgaagccggtaaaattcattttcatttcgaaagcgaacatccaagcggtaacgaagtattgcaagtaagcgatgccgctgtcggctattcccccgataaaatcatggtacaaccaatcaattttgaagtgaaccgccacgaacgcttagccatcatcggacctaacggaattggtaaatcgacccttctcaaaagtatcttgcaccaaattccgttcatcaaaggccatgaaaaagtcggtagtaacgtttcaatgggctactacgatcaagagcaacgcaatttacacactaacaaaaccgtcctcaacgaattatgggatgaacaccatacaacacctgaaaaggaaattcgcacactacttggtagtttcttattcaccggtgacgatgttttaaaggttgtgtcacaactcagtggtggtgaaaaagcccgcttactcttgacgaaactcgcgatgaaccatgacaatttcttaatcatggatgaaccaacgaaccatttggacattgatagcaaggaagtcttggaaaaagccctccgtgaattcgatggcaccgtcctcttcatttcccatgaccggtatttcatcaatcaagtcgccactggcattatcgaactatcagatactggtagcaaacgatacctcggtgattacgattactacctcgccaagaaagctgaagaaacagcttacgcagaagcagctagccaaaacagtgcaattatccaaccaagtgccaatgcactagatgcctacaaagcaagtaaggaaaaccaacgtgcacaacggaaactagaacgcgaagttactgctttagaagaaaaaatggccgcactagagactaaggccaacgcaatccaagaacaaatgacccaagcagacgtaattactaaacccctcatgcttcaagaactacaacaagacctagaaaaagtccaagctgaactcgctcaaacagaatcagactgggaagaacaagcgatggcactagaagaactaacacaatagagtgcgtcaaaagccggttatgctgcgagcatcagcctaacaaggcgaatgcttgctacaagcaatcgtttgacttgtgtagctaagcacagaaatatgcctgcaccacataaaaaagggtagcgatcaatatcgttgcccttttgcattttaattaatttgtttgccgaacggacttaacgataacgccgctagcttaaagtgttgccggccaaatggaatcccaataatcgtaattgataataatagcccccaaaagacatggctcgcccacatcacaagaccacctaagaaaaaccaaacaatgtttaataaaaacgaacctgcaccccccgttgaaacaacggttgcgttaaacggcatcaaggtcaatgcgccaatcttaaaacattgtagcccgactggaattccaataatcgtaatactccaggcaatccccagaataaaccaaccgatagcctctactaatcccccgaatagccaccaaattaatgtaccaattaaactcattgaataaactcctcgtaagatatatttataagccgttggcttacaataaaatttaattattactttgatactgcgggattcttcagaatataataggaccatggaatggatctatcgggaatttgctaaaaactcctgtagttaactctactttagtaagtccgttacccgagtctttacgctctctcccaactcactagctgttttcaatcaggcttatcttcaatgtagtagtttgaaggcggcataagtccaattggtcaaaattctgttacgcgaggttgtagctgtgtaaagattttctggggaatcccgcagtatcaaagcaagttccaaataactctcgaaaggaggtccttcctgtgaaattatttgttggtttagatattagttctgaaaagattgatgcttgttttatgactgatgatagtaacttatcaatcctaaatcgtttaagtgttgctaacgatttaaatggtgcttctgaaattaaagccttaattttaaaacatcacgcagaagtatcatttgaacagattgtgattggtatggaatcaacatcactatatagttttcatccagctatgtttttccaagaagatgcagacttaaatgcactaccaacggtagtcactgttgaaaacccatttaaaatcaagcaatattctcgtgtcttcgatgaagacaaaactgataccaatgatgccatgcgaattgctgactacttacgaattcaacgttttacaacgtcacctatcaaagaagaaaaatatatggcacttcaacgtttaacccgtactagatatcaactagttaccgaattagtaacggttaaacaacatttcttagaaaacttaacttataaatgtaatacgcttagtaaggaattaaaatcagaatctaccggcatttttagcgccacaattgtacatttaatgactgaaaactactcattagatgaattagccaatttaccactagaggacttcgtccaattgattcaaaatgttggccgcagtaactttaaaaatcctgaaaaactggttaaaaccattcagcgtgccattaaaaatagctatcagttgccgcgattaatgaatgagtcgattgatattattctcagtaccttggtagttcaaatgcgttcattacagcaaagtattaaacaaattgataaaggtatcgaaaaactagttgaaataattcctgaatatcaatgcttaaccagtgtgccaggaatcggtaaggtttatgccgcaggtatcttagctgaagtcggtcaaatcgaacgatttgatgatcaagcaaaagtcgccaaatatgccggtctatcctggaaagttaaacaatctggaaattatcagtcagaagtcacaccactaacaaaacaaggtaatcattatttacgttattacttagttgaagccgccaactcggtaaaaaatcacttacctgaatacacagctttttataaaaagaaatataccgaaaccccgataaataagcaccgccgagctattgttttaaccgccagaaaatttgtgcgtttggttgatgcgctactacgcaatcaccaactttacacaccaccaaagagtgtgttgaaggaataacgtagttattcacgcaaatctttggaatacctactaaaatttttatgaattttaagtaggcttagtttagtgttgccaattttgtaaaattacacgatatttatatcaattatcttcttgacttattaccactagactttatacttgattaccttaattatacctgattcataaacaaaaaaagcggtagccgcctaaaaataggttgctaccgcttttcttaatctttttttaaccgattaatgctaacgcttgtttcaagacagtttcgccgtccatcatgccgtaagccttcatatcaattacttcaacaccgattccttttggtgccaatttttctttaaattgaccttccatgaaacgaacttgagggcctaatagtacgcagtcaatttttttagattcgagttggttgtctgcatctgaagcgccagttgcaaaaatttctgcgtctaaaccttgtgcttcagcggccttttgcatctttgaaactaataaacttgttgacatccctgctgcacaacataacatgattgttttttctgccataatgaattaccccttaaattttaattggttagaaagcgataaaaggcttataaaaagcgttttcatttcctctatgtttttagtataagcgctttctttattaatgtcaattaatgttatttaaaaatatataagccgcccattttgttgacctatcccaatcattaacctgtcacctgttattttatcgcatgaaaagtattttttatgctccctactaaacacaaaaaactgctaaccaatgcctaaaaatcgtcggttagcagcttttagctattttattgtttagtatagaatcgttttaattttgtctggcaacgcgattgtgcccgtttcatctgttcaaacgtgcaatctagctggctacacgcttgctcaactgctagttgccccgtcaaaacccgaaaggccactaactctaaagcagatagtgtctctaagtacgcccgcatttcaaccgttgactgatagtatgccacggtatcttcagcgagcgcattgcattccggacaacaatcaaataacagggcttgctgatcgacccgtcgtttctgagcaagttctttgcgaatcaagtttaatacgtggtggtgaaagcgtaatttataaaaaccaccaaaacttttgccgcaattttgatcataacactggcaagtctcataacagacgattcgcgcttcttgtaaccaatcgtcctcatcaaataagcgaatataatatggagtaaaggtgcgataaaccattggtaggtaggctttaaataaaacatccaacgcctcagaatcgttttcaaccaccgcttgaattaagtttgcatcacgttttgctaattccatcaatgaaccacctctcacgcaaccccacgcctttatcttaacaagttatcgtacatttattaagagaacgtttgtttaatcatctttttcagcacttagtgcatctcgcacctgtgcaagttgatctagttgcgccggattccacggcatattccgttgcaaggtccgatcatgataatgcttggcatcatggtcaatttcacggtgcgttcggcgaatctcacgataaaaatcgtgcgaagacacccgcaatgcgccccgtgaaaaaatcgtccactgctcagcttgatcactcgaaaccaccgtcacttgcgtaatcggcgacattaatttacccgctaagccttcgatataactgtccgctgtttcatcctcatcggtgaagacaacttccaaattatactgcacataactttgtttaatccctggcacatacattgcatcaaatactaagatgacttcaatctcacgaaacttgcgatattctgataatatctgcaataagcgatcacgcgcatccgcgagatgatcattttgtttcaacttatccagctcgggccagttcccaatgatattataaccatctgcaattaagatctgttttttcatctgctataccaaaggttgacggctattataagcctgatacattaaaacccccgcagcgacactcgcatttaaactttgcacatgaccgaccattggaatcgtcaacgtttgatcaacttcttttttaacaattggtgaaagccccttgccttcattaccaatgattaagccgattggtcctttagcatcccacttacgatagtcggtaccagccatatcggtgccaaaaatccaaagaccacggtccttcaatttcttaatttcttgtgttaagttcgtgacacgcgccactaggatatgttcgatcgcaccagtcgatgtcttagcaactgttgatgttaaccccaccgcacgatgcttaggaataataatcccatgcacaccaaccgcatcagctgtccgcatgattgaacccaagttgtggggatcttccaagttatccaagattaagataaacggttcttcttctcgggctttggccttagcgaaaatatcatcaacactcgcatattcaaacggtgcgattgctaagataatcccttggtgattttgacggtcactcaataagtccaacttatttttaggcacattttgaatgattagacgtttttctttcgctaatttcacaacatcgtggacaaagtcagccttcaagccatcttgtaagaaaattttattgattttcttcgcatcactggtcttcaatgtttctaaagaagcgtgttttccgatgacgaaatcagtttgttcttcaacaactgcttcttcgacgggtgctgctggtttcttgttagctggacggcgcgttggctttgccgaattattggccgtccgacgactattgaattcgttgttcttttgtttgaatggttggttattattttttctcatgggtcctcccagcgtcgacttgttgaatacaccagtgggctaattcagcgacgcgctcttgttgttcagttaagtatagatagccaaaaactgcttcaaagcccgttgaggtccgataagtcgaaacactcgtattcttggctttcgtataacttttggcatttctaccgcgtttaaaaatattcatttcttcttctgttaaataattatcatcgatcatcaaaccaatcaaagcagcttgcgctttagccgacacataatgtgtcgccacttgttgcaagcgcgttggtttggttaaaccgagttctagcaaatgggcgcggacatacacttcgtaggctgaatcgcccatatatgccaacgcaatcccgtttagttgtaaagcatttttcatgcgcgtctccatctcattccttgtggtgtatcttccaaaataatcccttgttctttcaattgatcgcgaatcgcatcactgcgggcaaaatcctttgctgcccgtgcagctttgcgttcttcaatcaagctttcgacctctgcgtccaacagttgggccgccttaaactcaacaccaaaaatggctaacaagcgcgttagacgggcagttaaatccactaacgtaccagcttggacggtagcccgttccaggtattgattactaagcttagcgagttcatacaattctgttaacccgttttgcacgttaaaatcatcatccatcgctgtcacaaaggcgtcttccaagcttgccgcttgtgcggcaatgtctgcgtctgcgcccgcttcagcagtcgcttggcggaacgctaagttatcgagggccgtttttaaacgatccaggttcgtttgcgcttcagctaataatgattcactgtagcgaattggtcggcgatattgcgtgctactcatcaagaaacgtaatgcttgtggattaacttcttgaatcaaatcatgcaccgtcacgaagttgccaagagacttactcattttttgatcatcatccccgactgtcacaaagccattgtgcaaccaatagttgacgaaatgtttaccagtcttcgcttcactttgagcaatttcattttcatgatgtgggaactctaaatcttggccaccgccatgaatatcaatcgtgtcgcctaaatatttggtcgacatgactgaacattcgatatgccagcctggtcgccccttaccccaaggtgaatcccaagcaatatcggtccctttttctgacttccaaagggcaaagtcgattggatcttccttacgtagggtttcttcggttgctgtatgttcgctggccccttgttcgagctgatcgatatcttgaccagctagatggccatagtccttaaatttacgagcacgatagtaaacatcgccatcaacggcataggcataatctttagcaattaagtcttgaatgaacgcgataatttctggaatgttttctgtcgcccgcggattgagcgtcgctgtttcaatattaagtgcttgggtgtcttctttaaaagcggtgatatagcgttcagctaattccggaaccgtgatttgttctgcactcgcagccttaatcatcttgtcgtcaacatcggtaaaatttgagacataatcgacttgatagccacggtattcgagatagcggcgaatcgtatcaaaggcaatcgcactgcgcgcattaccaatatgaatatagttatacacagttggtccacagacatacattttaacgcggtctgcttgaatcggtttgaagacttctttttgacgcgtgagggtattataaacggttaacatcgaatcttcctttcttaaacgtgctcttgcaggcttatttctgcgcttaaccaaatttgcccaatcggcgattgcatcgccaattcgtcaaatccagttaatgctcaaaatataaccacctgctgtcgcactcttcttctaaacgtgctttttgaaaccgacttctgtgctttgctccataccgcaaacgatcgccggtggcgctccctcacggtattaggcaaatgctcgaagtcaaaccgtttcaaacgcactcttccaaataaaaagcgtcctttgttggttaacaaaagacgccgattgagcgtggttccacttttctttgcaaaaatgccttgaacaggtaacggtgtcccggctaagtcacaaagtcacttggcatttcagaggtgcatttcgatggggcaatcggctttcttccagcaattcgaaagctctcttaacaattggcatcatctacttattctcttcatcaattttaacggtttagttggtctccatgatacagattattgacgaccgtgtaaagtgttctgcgtggctatttttctttcaagcctttttgttgatgcgctggtctagcaaaaatcatccgccccgcagcggtttgaagcgcacttgtcacaatcacttctagcggtttatttaagtaatgttggccatcttcaacaacgatcatcgtgccatcatcaagataggcaaccccttgttgccgttctgttccggctttcaccaccgtcacggtcatcgcttctccaggtaaaactgcaggcttcaacgtattggcgagttgattgatattgaagaccggtacgttttgaaattcacagaccttgttcaagttataatcattcgtcacgacaatcccatcaagtaattttgccaatttaacgagtttactatcgacttccgttaaatcctcgaaatcaccgtcgtacatttcaacagataagctatcgtctttttgaatatcgtttaagatatccagtccacggcgcccacgtgcccgcttcaaattatcagcggaatctgaaattaattgtagttcatgtaagacaaagtttggcaccatcaatgtgccttcgataaagcccgtcttagcaatttcttttattcggccgtcaataatcacacttgtatctagaatcttatacttacggaaattatcgccgactttacgttctaatacatcagcattgcgtttcttaggttgcatcaaacggcgccattcttccattcgcgttgtcccaattcgaaagccgagataccctaaagcaatcatcaataaaatgggtacaactgtatttaatgcaaaaatgggcatccggtatagcggaatcgaaacaacgtttgctaataacaatccaattagtgaaaaaacactcccaaataaaataaaactaggtgattgtttcgttaaggctttttcaagccggtgcatagctctcaacattggtgttgccagcgccaagaataatagatagaaaataatggcccctaaaatggcgttagtaataccgttattgagatacatcatgtcttccaaatgaactaatggccaaaatactgggaacgccgtaattccaagcgcacctcctaagataatgaacacaattcctaatattctttttttagtaaatcgtttttgttgcatcgttcaacctcctctcgctccaacttatgcctagttgaatactttctttaaagtttctgcaatcgtggtcacaccaatcacttgaatatccgtcggtgcgtcccacccttgtaagttattctttggtacataaatacgtttaaagcctaatttagcagcttcactgacgcgttgttcaatccggttgacccggcgaatttcaccagtcagaccgatttcaccgacgaaacaatcagttggtggaatttctttatcccgatagcttgatgcaatcgaaacagccatcgccaaatcaatcgcaggttcatctaatttaacaccgccagttgcttttaaatacgcatcttggttcgataacatgagactagcacgcttttcaagcaccgccataatcaaggagactcgattatgatctaaccctgaagacgtgcgctttgcattcccgaatagtgttggggtaattagggtctgtaactcgaccaagatgggtcgcgtgccttccatcgaaacaaccacggctgaacctgtcgcccctgccaaacgttcttctaggaaaatctcggatgggttcgcgacttcttttaagccggcttcacgcatttcgaaaatcccaatctcattggttgaaccaaaccggttcttaaccgagcgaagaatgcggtaagtatgatgcgtatccccttcaaagtacaacacagtatctaccatgtgctccaaaatcttaggaccggcaatagcgccctctttagtgacatgcccaaccacaaaaatcgtaatctggttcgtcttcgcaatgcgcatcaattcagcggtgacttgacgcacttgtgaaacactaccgactgcggaagtcacttctggttcgctcatcgtttgaattgaatcaatcaccacaaagtcgggtttcattgtttcaatctgatgccgaatattgcccatatccgtttcaggatataagtaaagttgatcgccattcacatcaagccggttagcccgcatcttaatctgggatgcactttcttcaccagaaacataaagaatcttaccaaccttttcaagttgtccggaaacttgtaggagtaacgttgatttcccaatcccaggatccccaccaattagaatcaatgagcccggtaccactccaccgccaagcacgcggttgagttcgtttaattcagttttaatacgcggttccttttgaatattaacggtgctgatttgttctggttcagttgcccgccctgaaatcgtaaaacttgatttcgcgctagctgcaggttgttcacgttcttcgaccatttggttccaagcgccacaattcgggcaccgacctaagaatctcggggaactatagccacaattttggcaaacaaactgagtcttaattttagccacaaagattctccttcattatcgagattagttttattttaacataagtttgtgaattttcggcgacctagcgattaacgtttagcgaccagatgagccaaacccacccgttcgtttggtggttaccgtcgcttcatcatctgcgactaaatatggcatgaagatgccttgtccaattcgttcaccttttttcaagataacatcccgcggactgaagttaaccatttggataaaaatttcaccttcgttggcatcattgccgtagtaatccgcatcgataatgccgacgccgttgggtaaaattaacccttttttgagtgggttgcttgaacgattggcgatcattaaatattcgtcgtcttgcatgtaagccttaatcccggtcggtactagaaagggtttcaatgtttttgatgcacgttcaaaatcgtcatccactaacggtttgccatttcgaatcattcggaacaaacgcacaaagttgtaatgccagattgatggcaacacgaagtcctccgcacaagcaaagtcgtagcccgccgaatgcgctgttgaacgcaccggtaaactcaatcccgcctcttggtatttggtcacaatttcaaagccgcgttttttcattcctaaaactcctaatattatcgcccatttgggttctttttgtaccactgtatcataccatgaaaccgcggaggctgtgaataatgcctaagactgatttaattaaaaatttaacaaaaagcgcccaatcaaagcgtttttttcgtataatagatttattaatacaaaaggggtgtcttgatggataagaatgcaatgaaaaagatggcagctgaacgctcagtggattttgtcgaagataacatgattttaggactcggaacaggttcaacagtagtttacatggtggaagccctcgcaaaacgggtacaagcagaacacctcaacttaacatgtgtctgcacctcaattcgtactgaagaacaagccaaatcacttgggattccggtcaaagcactcaaccatgtcgaccacattgatttaaccatcgatggtgccgatgaagtcgatgccaacttccaagggattaaaggcggcggtgctgcgcacttattcgaaaaattagtcgcaactacttcaacccgcaacatttggattgtcgatcaagaaaaagtggtcgatacaatcggtcgcttcccactaccagttgaagtgattccatttggcagccaacaagtgttcaacaaaatggctaaagaaggcttaaatccagaattccggatgactgcagacggccaacacgtcttaactgattctaaaaactacgtcatcgatttacacctcaaccaagtccaacatccccacctactggcatcatggctcagtgaacaagtcggcgttgttgaacatggtctattcctagacatcgtcgaccaagtcgtggttggcgcacctgatggcgtgaagattttaacagcaaaataaagcgtgcgtttaaagcagatttgacactgtgcactagcacagtgttttaaatgaccgacaaaatcggtcgtttgcaatacgtagctaagcgcaagcgtcagctttaaaaagcacgtttccaaacgaaccctcagcggttcgtttttttgtgtcccgtgctctcatataaatcgttttctttcacatttatcaatcaccattcttttagctttatccccgttattcggtttacatctcccatctaatcaactagaattaaactaattcaaaaattaaggagtgattagatgacccaagaaattacacataataatttaatcaagatgcggaccgctttagctggcgtgccacaagcaacgacgctcaaaaatgctgtgatgacgaatggcattaacgccgttagtcaacgccccgatgctgccgtcacccttgatccaacctactcaatcgacctccccactggtgatgtcagctttcaaaaaaagagtgggcggtgctggttatttgccactctaaatacattacgccacgatttcgaacagaaatatcacgttaagaatttcgaactctcccaaaattatctatctttctgggatcgcatcgaaaaggcgaacctcttttatgaaaagattttagcaactgccgacaagccgattacggatcgcgaagtcgccttcaccctcgctggtcccgattttgacggtggccaatgggacaacgcagtggcactgattcaaaaatacggtgctgtgcccaagtcggtcatgcccgaaacttataacagtgacttaaccactgaattcaacagcactcttaatttgaaactgcgcaaagatgcgattcaattacggcaacttgttgctgacaacgctagcgaaacaaccatcagtgaaacgcggactggtttcttaagtgaaatctatcggctatgtgtttacgcattcggcgaaccagtcgaaacgtttgacttcacctatcgcgatgacgaccaaaattaccatgaagaccgcggtttaaccccgcaaagtttctatcaaaaatatctcaatcgcaactttgacgactacatcaccgttgtcagcagcccccaaacaagtaaacaatacaaccaactctacagtttagaatcgcaaaacacggtagtcgaaggtcacccaatgcgcctcttaaacttaccccctgaacgtttaaaagcactggctatccaatccttacaaaacggtgaaacaatttggtttggcaatgacgtgctcgcggatatggaccgacaaaaaggctggcttgatcgcaacctttacgactattctggactctttggtttcgatttgacgatgccaaaagaccaacgacttgactaccgacaaggcgttgtttcccacgcgatgaccctcaccggtgtcgacctcgtaaacgaccaaccaacgaaatggaaagtcgaaaacacatggagtgccaaagtcggtacaaaaggttacttcagtatgagcgacgcttggtttgacgactacgtttacgaggtaattgtcaaaaaagcgtaccttacaaaagaagaacaagccgcactcacaaaaaccccaattaagctagacccatgggacgcactgcaatagagtgcgtagtaagccgagtttatcctgaggattaacacagaacggcgaaggattgcgccagcaatcgtttgacgttcagggttaaccggaaggatatggcttacggagcacgtttcaaatcagagtgcgccatcaatgggttacttctgagcacttacagcacttgacgaattggcaatgcagtcgccgatttggcaagtgaggtaaggcggaagaagttgttgatgaaagcacgtttcaaaaaaataatgccattcaaaccgggtaatttaatttaacccaccaaattttagaggaggttttccacatggttcaacccattacagcaaaagatattcaacaattcaaagccgatttcaaggcaacaccacaatccaacacaattaaaaatgccattatgaataacggctttttagccacgagtgctaataccgattcaaaagccaaaatggcccccgttttttcaatcgacttagataccggtgccgtttccaatcaaaagcaatctggtcgttgctggatgttcgccgcgttaaatacaatgcgccacagcctccaagaccaattcaaaattaaggatttcgaattgtcccaaaactacaccaacttctgggacaaattcgaaaaatcaaactacttctacgaaaacgtcttgaagactgccagccaaccaattggcgaccgcaaagtcgacttcttaatgacaacgccccaacaagatggcggccaatgggacatgctctgcgcactcatcgaaaaatacgggattgtacctaagtcagtcatgcccgaaacatataatagtgaaaaatcaagcgaactcaacggcgttttgaaccttaaactccgtaaagatgccgttacattacgccaattagtagccgacggtgttagcgaagccgacatccaagctaaaaaagacgcgatgttaaccgaagtttaccggatgctcgtttatgcattgggcgaaccacccgttgaattcgactttgaataccgcgatgatgatcacaactatcacatcgaaaaaggcctcacaccgcaaacgttctatcaaaaatacgttggctgggacctcgaaaattacgtttcattgattaactcaccaactgccgacaaaccatacaaccacttatacagcgttgaaatgttgggcaatgtggtcggtggccgtgaagtgcggcatttaaacctcgacatcgacactttcaaacaactcgcgattaaacaactacaagcaggtgaatccgtttggttcggtagcgatgtaggccaatcatctgatcgcaaactcggcatcatggacactgaaatttatcaaaaagatgccatgctcggcatggatctttcaatttctaaaggcgaacgccttgattacggtgaaagtctcatgacccatgcgatggtcatcaccggtgtcgacctcgtcgatggtcaaccaaccaaatggaaggttgaaaactcatggggtgacaaagttgggacgaaaggttacttcgtcatgagtgatagttggtttgacgaatttgtttatcaaatcgtgatcaacaaacgcttcttaacggatgaaatgaaacgcattgaaacagaagaatacgatcacccaaccgttctcgcaccatgggatccaatgggcgcattagcaagtcgctaaacagtaaaaggggctgagacaaaagtaaattttgtctcagccccttttttgatattagaactttaatcgtctaaacgtgttcttataagtcatccccttccggctaatcctcagggtatcccgacttatggcacacgcttttttatattccagtaccgactgcgagcaagctatcataataaatctgcatcatcatttgccagtcactgaattgaagccattcatcccctttatgggcaatccctttttgacctggaaatgatgggccaaacgcgatgatgttcggtaacgcgcgcgcataagtcacgcccgttgttgtgaccggtgtgccatccaaaccagtatctgccgcataaatcgcagagggttgttgaataaatggcaatgttggatcagtaacttgcgatggataacgccgtttaaccgtcaacgtcatccccggcaacatggcagctttaatcccagttaacaactgatcttccgtcactgggattgggtaacgacatgtcagatgcatacttaactgttgggcttcaatcgataccccataaaaagcaagttgcaatgctcctgatgcttcatcttgataattaatccccaagttttccccagttgactgcgtcccgattttagcggctacccattgataaaattgacccgtttgaccagtgagttgacttgcatcggcaactaacttcggtaacacattatccgccatttcgggggcattgctaggtgcctttttgccgtgataagttttaaccgtgccatcggccaaaatcagctgtgcatgatctggcagataacttttagcgaaccgtccttcaaccgccgtaatttgttgctcagagccgtccgtaatcggtaacgctaactggacatctaacaagccccgttcgccgtagacggctggaaatttacaatctggtgtgaatccggcatatggtgcggaatgttccgccaaataaattggcatatcctgactcccagattcctcatcagtgccaaaaataattcggacgcgttgtttaaatgttatcttttgcgtcttaatcagatacagggcaaataatgtcgataaaagtggtcccttattatccaaaacaccacgcccatacagcatattatctacctgagtcagttcaaatggtggataatgccaatcatcttcaacatccacgacatctaaatgaccaagaatcccaaaataagttggcgcttgcgtttcgtctggtccatattctgcccagccaacacaattgccgacttgccccgtcctaaagcccattcgatcagcaatcgccaacactgtttccaatgcgcgtttcggaccaattccaaacggcgcttcaaacgtttgcgctccacacactcggcacgcgtaacacttcccgcaagtccgctaagaactcatcagcatgtgcttcaaataatgccttaaaatctgctctaatcggtttcacaagaatggcttctttctattaaatttcgtcaaaattaatatcaacatcgtctaagccagccgcttcggcttcttccgccaaatactgccgatcaatcatcatgataaatggatagtaaattaaaattccaagcactaattcaaataattggaggactgaccctgtccaactcccagttgaaagccacccagaaataatcggtggtgttgtccatggcaacataacgccatttgtatacggtacccatccgagttggaatacaatccctgaaatcaacgtatttaagaccggtacgataatgaatggaattgcaataattgggtttaaaacgactggcaaaccgaagataatcggttcgttaatcccgaaaataccggggacaattgccaacttacccaattctttgacgcgttttgacttgcagacggttaacatgacgattaagagtgacagggtactcccaccgccaccgtatgtggtgaagatgtcaataaattgttgggtgaaaatatgtgataactgcgtatgattctggaatgctgttaagttatcttgcgtcagaacgaagaaaattggtgaccacacactgttggtgatagttggaccattaatcccaaaacaccagagcaacattgcgatgaagttataaagcaatacagatggcaatgagttgctggcaccttttaacggttgttgcagtaacgtgtagatgaaattgtaggccgtttcgaaactcgaaaggctaaaaccaattcgaattaagaagaaaactaataccactaagccagccggtagtaaggcatcgaatgattcactaactgcaggtggcacaccatctggcatcttaattcgccagttgcgtttaatcgcaaaacggtaaatttcaacactgactaatgcgataaaaatccctaggaaaatcccgttaggtcccaaatacattgtttgaatggcaccgattgattttttaccaacggtgacaacagtcggtgtcaaaattaagaatgaaataatagcaattgcactggtatgaatcgcttgtaaccctcggtttttaccataggcataggatatcccaaaacaagcaagcaaccctgtaaaactaaacactaaattagaaacagcactaaaccattctgtccagtgcggccctaaaatcccactccaaaattcagtccaaccaggaattggaaaattcccaatcagtaagaaaatcgatgtcacgataatcaatggcgtaatgattaagaaaccatctcgcaatgatcggagtacaacattattccccagtttaattgcaaccggcatcaaaatctgttcgagtttcttttgcatcggttttgcctccttttaataacaatattggttaataaaatcagtaaaatcagcgccttctaccttcattttgcataactgcaatgcgtggtcgattgaatccgaaagaccagtaccacccttttttggcatcttcacaatcgttatttgatcttgatactgttgaattaaatcggcattcttttcgatcgcggtcagcccaacaaccggaattgttgtttctttttgaatagtggctgctaattcacacgccatcgtcgaaaagtcccgataatcataggtcggtcccgcaatcacaacgtctgcacccattttctcactcatcttcgcaactttccgattcacttcggctttgttcgcctgataataatcagttccgcaataaaaggtcccgataatttcagagtccattttttttaatgccttatcgagcgtatccgcagcacccatcgctaatttttttccacctaaaggggtatcccctttttccttaccacctaatccagcttggatttgatccaacaagacaattactttcatttaaaaccctccttttaatgttcacgttgcaagatgttatggaacgtgtatttatcagcacgataatgcgagttatcataaagaattggataaccgtccattgaatacgcaaccgtgtgggctagaaaagcgggttgccctggagaggtctcaagtaagtcacttaagcctttttccaatacgactgcttcgagttcttggttggcatacccgattgggattgtttgctcaatcaagcggtagagtgacccttgtgcctcatgggccgttaattctggtagaattttttgtttcagatagatttgttcgtgggtcatcgcttcaccgtctgccattcgcaagcgttcaatctgccaaactggctcctgtggtgctaaatctaacttggaggccacatagtccggataaacgattgtccggcgtaaatctaacacccgcgtgctgacatccaattgaaactgtttggctgcttcggtaaaaccaactaaaacagatgaaccactcgaaattttactttgtgttgcaagtacataggtgccacgatttcgatcgcgtaccacgacatgttgtttaaccaatagatcgattgctttgcgaattgttagccgcgtcgttgaaaattgattggctaaatccgtttccgatggtaatttctgatggatcccatagacccctttttgaatgtcatctcgtaaggcttctgcaatttcaacgtatagatacttaaccattccaaccacttcctctattcaactggtgctttaatccgtttcgcgtaggcttcaagccattctgctgaaatgggttcgatcaccgtcgtttgacttggccctggattagccataaaaatttgtggtgccgcatcttgattgccagctgcaaacgtaaactcaacgttcgtcgccacgccccattcaccttgattatttaaggcaaccaacgaaaactcgccagctttgccgtagcgtttttttaatttctcaacaaacggatagactgcttgatcacacgctgcttgtggtgataaaccggtccccatcaggcgcacaatctcatatgaaagacagcccttcattaaatcttcgcctaacccagtagcggttgcgccaccgatttcgctatccacgtaaaagccactgccagataatgcagaatcaccagtccgccctggttttttcataaataatccagaagttgacgtccccgctgccataccggcagcttgatccaaactaaccatgccaactgtatcgtgaccatcatatgggctaagatttttttcgttaatttctttaattcgttgcatccagattttgtgtgcgcgttcggtcaacatattacggctttcaaaaccgttaaacatcgcatattgtgacgctcccgcaccaaccaagaaactattaaaatgatcgtcacttaattgacgcgcaactgagattgggttcttcacatcactaattcctgcaacagcaccaattgcaaaagtgttgccatccatgaatgccgcatccatctccactaagccttgcgcatttggcaaaccaccgtaactgaccgatttaaagaagggttaatcttccacttttttgatagcggtttcaattgcatccgtactttgcccaccattttttaaatcagccatcgctttttgaatcccttcaaaggccattcgccaagtcccaatcattgcatatgtcataactctcatctccacatgtaagcgttttaataatcacggtataatcaaaattgtatatacaatcaatactttttttgaaataaaaaagccaccgcagtgacttttcatttaaagatagaggccaatcaacattcccactagccaaaaaccgttaaagacaattagattctgaaccgctgtaccaaatacaacgcgtttttcctgactcttctgtaatgcaaacccattacgtaacaaagttgggccactcgcaaaagctagcgctgctggccatggatataatttcaggccaatcccaacaataatcaccacgtaacaactatacgcactaagttgataaagttgaatgccgcgcttttgaccaatgtaactgattaatgtgtgccgcccattctctaaatcgactgtgtaatcacaaatattgttcattaacatcaaattagcaatcaggaagacagttggtaaactcgccacaaacaccaaaatcacattcagccaattcagttggaataacattaacggcccatcaaagcgcaaatcgaccaactgatccgccggaacgttgacatacaccgtcaaaaagaaattaccgaaccctaataccagactcgataacaactcacccagtggtaatcgtgaaattgggaatgggccgtaagtatataaaatcccgattaagatgaacagaacactgatggctaacacaattaaatttgtgcgccagaccagaatcagccccagaacggttgccgtacttataaagccgatcaaccagcgtaaagcaaccttaggggcaatatcttgtcgtcctaatgcactggttgattgctggagcgtttcatttttagcgaggtgaaagtcgttgtaattattccatcccgttgtgaagacatcaattaacaccaatgcacagaagtacaacacggtattgatcggatcaatttggtggaaataatacaacgtaaaaaagaacccagccataaagggaatcacgctaccaactttagtgcgtaattcgataaaatctaaaaacgccttaacagacatctattccgcctccgataacattcaatagtcctattctaacagagaatgtctaacaaataaaaaaagagtcggttggaacaaaagtaacttttgccctaaccgactctttcaacagccgaaatttgatcatctaaccatgttctatctgaacagatcgcatacgctgtttgattctattttgttttcaaatcttcaatcgaattaatattcgtcatatacttcggtacagctaaaccgaccttagcaccctctaagttcggacctaagtcttcaatctgacctttgtaatccttgtagtataaaccagaggtcttcggtaaccatgcggaaacttgtgcatcggctgctttagttgcgactgacgcccacatcggttgaatttccatagcttgaatcgttggttgataaccttgttgacgtaaaacttcagccaccacgttagttgacgcgatttctgaatcccaagccacataggttaacttaattttcgtgccatgaacctttttaacacccttagtccactcagcaactttttctggattgccttgaatccaatcgcgcgccgccttttcaggttcaacaccgtcattgactttaagcattacggtcgacatttcctttggcgtccaatggaatcgatctaagatggtatatgcttctggcatatccttctttagccccttacgaacaaccgtattaatgtgttcagcttgaccaaaaacatttttggggtcttttaaaaacttgattggatatttagtaaacatccaatgtggttgccaaccagtaatgacgattgggcgtttatccgcaatcgctttgtctaacgtactggtcattgccgcagttgagctggtttgcaactgccagttctgatcattcaaatgatacttgttaattgcagtttgtgtggatgccataatcccagcacccgcgtcaattccggtaatcgtgtaattaatttgaccgcctaatttctcatcggtagcgtacggcttagtttgcgaactgcaggccgttagaagtgtgacgagccccactaaggtgaaaaaagctattaatttattcttcttaatcactgaatccctccttaatgtttacgttgccggttcaaagcttgggttaaacgatcaataataatcgctaagattacgattgccaagccggctgcaaaaccgcccccagcatcattccggccaacagcaaagtaaactcgtgttcctaagcccattgctccaatcattgacgcaatcacgaccattgataaggccaacatcatactttggttaaccccagccattaaggtcgatttcgccaatggtaattgaaccttaattaacttttgccattcagttgagccatatgaatcagaggcttcgatcaattcggttggcacttggcgaatcccaaggtttgtcatacgaaccgttggtggcatggcaaaaatcactgatgcgaaaacgcccgggaccatcccgataccaaagaaggcaacggctggaattaagtaaacaaatgccggcattgtctgcatgaaatctaagatgggtttaaatattgcctgggcaatatcgcttttggccatccaaattccaagtggcaccccaattacgagggaaatcagactcgaggttaacactaacgttaacgtttgcgtcatatcccgccagaaatcaaggttccaaatcaagagtaggccgaggacttcaaagataattaaaccccattttttggtgtcgcgattcgctaaataagtgacgccagcgataatcacgatgaataaccagatggggattaaatcaaacacccattggaaagcgttgataattccgccaataaaattcgttaaaccattaaaaaagccagtaaattgtgtcagccaatcgacaaagtgatccatccaattggcaattggtaatttagcaatcgtcattaaattaagcaaaatggttcacctcgtttcctgcaagtgcccctaagacggccccgcgaataataatcccacgtaattgttgcttatcatttaagacagcaaacggaatgcccgtttgcgaaatatcatctaagatatcagcaattggtgtctcttcatcggttgttggaacttcagtattcacgattgattgcaaatcacgactttctttgcggactaactcaagtacatcacgcgcatcaataatcccaactaactcacgtttactgttgacaacgtaagcattagaaacttcattttcacgcattcgttttaaggccaaacgagggccatctttttcaatattaacagtcgttgggcgaatcataacgttgccggccgtgtaaactttactacgatcaacgttttcgatgaatttctctacatactcgtcagcaggccgtgtcaagatatcttccggtgtcccggtttgaacgatttccccatccttcatgatcatgatgtggtcgccgattttgagcgcttcatttaaatcatgactaataaagataattgttttgtgcatcgtttcttgcaagtcgagtagttggtcttgcatgtcagaacgattcaatggatcaagcgcagaaaaagcttcgtccattaataaaatctcagcatcatttgctaatgcacgcgctaaaccaacccgttgttgcatcccaccagataattgtgtcggatactgatcgccataaccatttaaaccaactaaatcgagtgcttcattcgctttttgttcccgtgtcgccttatcaatgccttgaatttcaagcccataggctgtattttcaagaatcgttcgatttggaaagagcccaaaattttggaataccatgctcatctttttacgccggacttcacgtaatgccttcttatcaatctgcattaaatcctcgccatcgattaatacactaccttcagtaggctcaatcaaccggttgatcatccgaaccaatgttgatttaccactcccagatagtcccataatgacaaaaatctcgccagattctacttcgaagttagcccggtcgacaccgattgtcgcacctgtttcctttagaatcgctgcttttgattttccttgtttcagtaattctttggcacgcggcacgcgcttaccaaatatttttgttagatttttgacttgtaatttgacagtcatagaatccccctttgatttcattttctgaaaactatatctaaaaagtatacaggtttattgtgaaagttgcacaccgtccacttttattctcattttattctaatgtgatagttaggtaaccaactttctttaaaaattaaaaaatcgctagatggggctttatgttagtctttaaaaatcagattagttctaaaacggaaccaatctgaaaatgcaactattttcctttgtacattaaaattaaatgagaattaatcccttttaaaattcacaagcccttaattaggccatcaaaaaaagcgttgaccaaatcggtcaacgcttttaaaaaatttagccatgtactgcttttcgttgatagcgatgatacaaagcaagggccataatcgtaaagacaatcggaccaatgaccatccagaaggcatctaaatattgaccttctaacatcggttgaataatcgtaaaggcaattccgaagacaaggactaagtcgaccacaatcgtcaccgccttaacagcaactggtgatttaaagaattcgtaaggccgttccaaatctttgcgtgccttgaaatatggaaaggcagtcactaaaaagaggtatggcaacgatgttgaaacgttagacatcaaagtcaagacattatagaagtcaccggcagctttaccaccaaatgaaataaccgcgattaaaatgcagactaataatgcttgcgcccacattgctttttcaggcatgccatgcttgttaacttctgcaaagccgttcggccagagtgctttaggtgtcccgagtacaaatgactttaatggtgaataaatcaagacggcaaatgcgcctaagtaactgataaacatgattaaaccggtaatccgagcaaaggttgttccaatcgccatcgcaacgggtgtcgtcatcccaaaggcatggccgaattgataacccaagttttgcataagaacataagtaatattgcccatgttagctttattcccgctcaagacttgttgccagttcgttgagatgccccacataaagattgcaaccgcgtagattaatgtaatgaagactgtcgcaatcattaaccctttagggaaagtcttttcaggctgatccatactatcggtaacaccgcccatggcttccatccccgcgtaagcaaagattgagaagacaacaaatgataacatcccaattggtgtttgatagctactcatcggactcttaacaaaggtcgtcgtcccatgaatcggttctgccaaatgaaaacccgttttaaaccaaatcgccacactaatcactaagaatgcggcgaataaaaaggcaacggccatcccactgaatgacgcaaacttttgaatcttatcaatcccacgacttgataggaaagttaataataaaatccaaagaattcctaagacaccgaccacttgagtgccattcatccctaataaatgccaggttgctgtttgatctgaaccttggaggaacgttgaaaacggcacccacactttagcagctgttgacaccatccagacaatccatgacgctaaccagatgaacgtcccgatgaaagccgcctttttaccaatggatgcttctaaccaagaatagatgcccccgcgtgattctttcaaagaagaaccaaattcagcaaacattaatgaagttggtaagaaaaagaaaattgccgctaagatataccaaataatgctggcatagcccattaagtagaaagcaattgtggtattcgcaaagccgaagattgacccaaaaatcatcaatacgagaccttgaacgttaattttttttgatttcgccatttcaataagtcctttataattgtattaagtagaataaatatacaattcaaagggcataatgtcaattatatttgaataaatcaaccgtttccagcctttttattcatgtattcataattatatacaatttacgccacaaaaaaagacgttcacttttagcgaacgtcgattgccttatttaatgttggcaaccttagcgactttgccactattgacactcgcgctaatttccccttcttgaccgttattgataacaaattgatcggttgcttgacaccgtgggcaagttgtttcaatttgaaacttggtagagccatctgaattatcttctagtgctgtcttcatcgtgatttccatcgctggatgttggcacttatagcattgaaagacaataaaacgccgttctacaaattcatctgctaaactcatgtgattcatcctttcaactagcttatttaagttcattctagcagtctgctattttttagggtacctttttgctcacgtgtcgttttctgaaagcatcccttagaaatgaatcaaaaggcgaacgattttaaagtttaaaagcattatggtatgtgatatacttacaacacaccatctagaaggagaggtttaaaagtttgccaatcacactaaaagcaagttatttttctgcaaattcaccaaattatagttcatttcacgaatattcactgatagaaatcagtgataatggtcaaatcacaaacattattcatcaaacggcgtcagaatactctgagcgattatcagctgcgcgccaacatgaccacttaatcacactcgctcccggacacttcttgttaccaggctttatcgatctacacaatcatgcgccacaatggccacaagctggaattgcccttgatcgccctttagctgattggctcaatcattatacctttcctcttgaagcgcgctacgccgatttagatttcgccacacctgtgtatcaagacttagtgaccgaaatgctcgctaacggcacaacaaccgccctatatttcggaacaattcacaattctgcgaatctacgactcgcagaaatttgttcccaagcagggcaacgggctttcatcggaactgttgcgatggataatccagatcaaacaccagactattatcgtgatgcttctcctgaagaagccattaataaaacacaaacttttgttcaagcaattcaagatacctatcgtaatgggttcattcaacccgtcattaccccccgcttcatccctagttgcacaactgaaacacttcagcaactcggtcaacttgcacagtcccaacacatcaccgttcagacacactgcagcgaaagcgactgggaacacgattatgtacgcgaacgttacggccatacagactctgagatgttgcaatcattcggattattgaatcaacattcggtattagcacatgcaacacaactgacaactactgaccaaagtatcattaaaaccgaacaagcagcgattgcgcactgccctatctcaaatacctattttggtaacgggattctccccgcacacgagttacttaatcaaggcattaaaattgggcttggcagtgatatcgccggtggttatacccctagcttatatgccaatttgcaacaagccgtaacggcctcccaaattcgacaagacggggttgacgccaccattgcggctgaccaacgcggtgttgcgaacagtcggatcagtgctaaacaagctttttatatggcaaccgtcggtggtgcaactagtcttggcattcaagctggtgccattgaatcgggattgcttgctgatttccaaatcgttcaagcgccaccacgctttgcaagtcttacaccagatgaacaactcgaacaacttttattccgccacaccaaacaccaaattaaggccgtctacgttcaaggtaaactggtccacgaaaaggagcacaactggtatgaatgaacaatctcaaaaattaatggtcggtcctgacgagccgatttcgaatcaagaagctggcttcttaggactacaacacgttttagcaatggatgtctacgttccccccgttatcattgccggtttattggcgatgggtcttgatgcaaaagccggcttaattcaagcgacattccttgctgccgggattggtacgattcttcaaaccaaattttttatgaaaatgcctgtttcccaaggcccttcatttgttccaattggggcaatcgccgggatttactttgctagtggtgctaaagacggcgggatggcaacggtgattggcgcttcaattgtcggttcaattctgttaattcttctcggcgtcaccggcctcttccaaaaaattattaacagcttagtcccccaagtcgtcggtggcacaatcatcaccatcgttggtctttcactgatgccatctgctttaggtgataacattttcaaagcacagggcaatatcaatgagaacttactcctggctgttgtgaccgtcgccattctaattctttgtgtttcgctaggtatctacttccctaaattacaaaaactcttcaaagttagttccatcatcatcgccttattaggcggaactgttttagcaaccatgcttggtaaatttgactggcaaagtgtgaacgaagcgagttggtttagcttgccaagtttcaccgcattccactatggtatgcacttttcgatgacagcaatcatgaccttcgtcattatctacgccgttttaatgaccgaaacgaccgggacttggtttgcaatgagtgccgttacggattcgcccatcagtaagaaacaatggaatcacgggattatcggtgaaggaattagctgtttaatcgctgcactcttaggcggctcaccagttacagggtatgcaactaacgccggcattatttcaatcaccggtgttgctagtaaaaaagtattcgtttctgccgggatttggtttatcatcttcggcttctttaataaattagcggccttcttatcagcgattccagccccagttattggtgggattttcgccatcatttgttcaactatcatgctcaacgggttaaatgttattcgcacactacacacccaagaacgtgatatgtacatcatcggaattccaatcattctatgtatcgccatcatcatcatgccacaatcattggtgaaagcaacgcctcaaatgatccaatacttacttgaatcaccaatttcgatttgtgcgcttgccgcaattattctcaacttaatcttaccaagagacagacaaattgcgtttaattagactgaaataaaaagaagccccctgataaaaaagtttatcagggggcttcttttttcgtaaatgtatttcccgattgagacagcacactttttttaaacgtgctccagcaggcatattcctgtgcttaaccaaacttgtcgcatcggcgattgcagacaaatccagttaatactcgaaatataaacgcctgcttgcgcactcttttagacactgaccattcgaatcgtcatgatgttcttattcatcgagatatcttccacaatttctgcatattgcatttcccggggaatttcgatgcgatagacgttagtgtaaatcgtatcacgttcgttttgcgttactgagaagttcacatcgcgaatttgaatctgatgttgttcaaaatagctctgaataaactccttggtttccaatttatgcttatacttaatttcgatttttttcaacgtattgatgtgaataatctttttcaagaagacaatcacgaaaatgacaaagaccgcactgatcaccgcaatttgatagtagcccatcccaattgcaagtcctaatcccgcagtagcccaaagtgaggccgccgtcgtcaatccttgaatcttgtggcgggtgacaataatcgttccagctcctaaaaaaccaatcccactgacaacttgtgcaatcagccgcgcttgatcagaacgaatagtggtactaatcgcactatgcgctaatgcaaattgaacgttttgcgctgcgatttcctgctgaatcatcgcaatcacacacgcaccaatgcagaccagaatgtgtgtccgcattccggctggacggttcttatattcccgatcagatccgataatcccagcaattaaggttgccagtagcagtcgaataatgatatgcacactcgttacttcaaacaataaaatccctccaaaataataccttatctctagtctagcataccgaacaaaaaaagcgctcgtcaatccatatcaatttacggattaacgagcacctattcattagccaactaggccgattgtttgtagaatcaaatagatatttaaaagcgtcaacacaattgtgacaaaccatgccgtatatttcacccaagggcggttaacgaatgggcccatgattttttcatcactcgtgaacattgtcaatggaatcatcgagactggcaatgcaacactcaagaagacttgtgagtaaatcaagaggttttcaacttgtgcttcgttcccatggtagtaaaccgtgaaaataataacaggtaagattgataacccacgggtaatcacccgtcgtgcccacaatggaatcttcatgcgaacgaaaccttccatgacgatttgtcctgaaagtgtccctgtgatggttgaattttgaccagaagctaataaagcaacggcaaagagtaaactcaacattgggctagcaatgctcccaacaatttctttgttttgtaaagcattgaataagtcaacgaatcgtcctaaatcactgttagttccaaagaacattgctgcccctaaaactaagagtaaacagttaacgataaatgcgactgataattgaatgtttgaatcaatgactgtaaacttgattgctttcttcttttcggcgtaatcgtcacggtcatattgacgtgcttgtgcgattgacgaatgcaagtagagattatgcggcataacagttgccccgacaatccctaatgccaagaatagcatcttctggttggtaacaatccgtgtacttggtacaaatccgcgcattacgtcgcccatatttggttgtgctagaatcacttcgtataagaaaacgaataaaataacggccaccaaggttgcgacaatcgcttcgatcttccggaaaccaagtttcattaatagtaataatagcaagacgtcaaatgcggtaattaagacaccccagagcaatgggatgttgaaaatcagttctaacgcaattgcggaaccaataatttcggcgatgtcggtcgccataattgctaattcggtgacaatccagaggaaaatccccatctttttaccggttttggcccgcgtcatctgcgctaaatccattccggtcacaattcctaaacgcgctgccattgcttgtaataacatcgcaattaagtttgatactaggatcacactgatcaaggtgtatgcgtattgcgcaccaccggcgattgacgtgatccagttccctggatccatataaccaacggccactaacgcaccaggtcccataaaggccatcaacgtccgccaaaaaccagcgttcttgggaatcgcaaccgtgttattaatttcttcaagactcgtgccatcagcatagtgtatgaatttctcatgcttttgttgattaagttcacccttttgtgaatcttctcgctgcttcttatccatataagtacctctttctcttcgattgagtcgttcaactattaggattcaatgactttgattttaggatgacctaactctgatcgtctccagtgttcaaattaatccttacccattctatcatatctctttgatgttgtccctgaacaagattaaaaaaaagctgtttctcagcgtttttttaggtaaccgattacaaataattgcccaccttaagtgctattaaaaatgacgttgactgtctttaacagccaacgtcatttaacttttatttagacgactaaacttaatagtaaaacgccaattaacccaacaatcgaaatcaatgtttccaaaactgtccaagttgcaagggtttctttgacacttaaatcaaagtattccttgaacatccagaacccggcatcattcacatgggaagccgctaaactgccggctccaattgaaaggaccatcagtgcagggttcacaccggctgattgcattagtggtaagaccaagcctgccgccgtcaatgacgcaacagttgctgaacccaatgccacccgtaagacaactgcgattaaccaacctaataatagtggtgataaattggcatttgcgaataatttagtgacactatcgccaaccccaccgtcgatgaggatttgtttaaacgcaccacccccaccaatgactaggagtgacatcgcgattgatttaacggcttcttcaatcgtcttcataatcgctagggttttaatccgacgcgcccaacccatcgtatacatcgcaaccatcaatgaaatggtcattgcaatggctggtgtcccgataaaaccgacgattgaatccagcatcgttggatttttaggtaatttcccgccgttaaaggccatttgataaatcgtggtgacagccatcaaaatgactgggaataatgaggttatgacactaattccaaaccccggtgtttcgtctaatttaaaggttttctgaggcccaagtgccgtcagattaccttggcgcgcgaacgcatctggtactaagcgttttgcaatcttagtgaataatggaccggcaataatcactgaagggatcgcaattaagaccccatataacaatacgtgaccagcatttgcccctaaagctgaggtaattgctgttggtgctggatggggtggcaagaacccatgtgtgacagaaagtgctgcagccatcggaattccaaggtacaaaattgacacacttacttcgattgcaatcgcgaaaacgattggtactaacaagaccatcccaacttcaaagaataaggcaatcccaatgatgaacgaagccaacataattgcaatttgaagtcttttttaccgaacatatcgattaaggtatgcgcgattctaaacgcgccaccagcgtcggcaactaaccgccccatcatggcaccaaagccaaagacaattgagagctcaccaagttgaccgccaatcccgttttgaacactggttgcaatgtccgttaatggcatacctaggccaaccccaacggccattgccgttataactaaagcgataaacgtattgatcttaaatcgaataataagggcgagtaataagataatgcccaataataggactactaatgccataattttccctattttcaataatgtttgcgctatcatgatattgttaaaagtaactgggctttcagacccagttcacttcgttactctttaacttgcatatgtttgcgttggaagtcagcaattgcgccgtattccgtatttaattcccgtgttaatcgaatccagattggtaatagttcgcgataaacttcaaagttggcttcttctggatgatgcacattcgtcacaccaaccatttctttgacagctgatagatcatccactaagcctaaactatacatccctaagacagcagcacctaaacatgagctttcgaaactctctggaatcgtgacgtcttgttcaaagacatccgccaacatttggcgccataattctgaacgggagaagccacccgttgcctgaatactctttggtttacctgccacaccttcaatcatcagcatcaccatgtataagttataaacgatgccttcaagcgctgcacgcaccatgtgcacccgcgtatgttgccgcgtcaaaccgaagtatgatccacgtgcatctgcatcccagattggtgcccgttcgccacccaagtaaggatggaataagagtccatctgaaccagccggaatttctgccgcaatttgtgtcaaaatatcgtatgttgaaacatgcatttgttcagccttgcttttttcaggtgcaaaaagttgatcgcgcacccaacggaagacaattcccccgttattgaccggtccaccgaccacccatttatccctggttaaggcgtaacagaataatttaccgtttggatcaaccactggatgatcaacaaccactcgcacggcaccgcttgtcccgatagtaacggcgactacgcctgggtcaattgcatttaccccaaggtttgataaaaccccatcgctggcgccaaagataaatggcacttcagcaccaatgccggttaattcaccatagatcgggtcaatccctttaacataatccgttggttcgactaattcaggtagttgttggcgtgtgacaccagccacttcaagggcttgttgatcccaatctaaattaaaaatgttgaacaagccggttgctgaagcgattgaataatccatttgatacgtatggaaaagtttttggaagacatacgttttaatatcgatgaattgactagcttggttgaacaattcgggttgcgcttctttcagccaaatcagttttgaaagtggcgccatcggatggattggtgtgccagtgtgttgataaatggcttggcccaacccattttctttcaattgttgacttgctttagcagctctattatccgcccaagtaattgcccgagttagcggttgatcatttgcatccatcagaatcaagctgtgcatcgcagccgagaaactaacgccctgtaattcgccggcttgaacgttgcccttgcgcatcacctgtcgtaatacttctgacactgcattaaaaatttcatccggatcttcttctgccatatcgggtacggtttgatataaaggataaccaacgtttgcgtaagctttaacattcccttttaaatcatataaaaccgctttcgtacttgttgttccaatatccgcaccaatcatatatttcatcataattacctcgtttatgtggtgtttactgactacttactaggataccacttatttcttatcaactgcatggccgccgaattcatttcgtaaagcagcgacaactttaccagtgaatgtatcatcttcaagtgaacgataccgcatcatcaatgataaaccaatgaccggtgttgggacttgtaatttcaaggcttcatctaatgtccattttccttcacctgatgagtgcatgataccttttaagccttctaagttagggtcttttgcaaaagcagattccgctaattccatcaaccagccgcgaatcacagaaccattactccaaaccttagcaaccgcttcgttatcatattcaaactcaccatgtgataacacatcgaatccttcagcgatagattgcatcatgccgtattcaattccattatgcaccattttgagataatggccactaccagccttcccggtatagagatagccatctttttgagcaatatctttaaaaatcggttcaatctgtttgaagacttccgcgctgtcaccgccgatcatgaagtttccgtctgcgttagcaccgctcatcccaccagaagttccgacatcgaagaaatgaatcccttttgcggcaagcaatgcattgtgttgtttagaatcttcgaaaaatgaattaccaccatcaatgacaatgtcaccggctgtcaatttagtacttaacgtttcgattgtggcttgtgttggcttaccagcaggtaacatgctccacacaattttaggttgtggcaattgtgccaccacatcatcaatatcctttgcaggtaatgcacctaagcgggttgcttcttgaaccgctgcttcatttaagtcaaaggcgacaacctcgtgcccattacgtcgtaagttagcgaccaagttaatccccattttgcctaaaccaatcattgctaatttcatctttgccagtccccttatccacaatttcatgtcacttttattaatgtctttattatatgtaaattattttcttcaatcaaccctttttgagaaaataattttctttgttgttttttatgctatactatcgataacaggggggcacttcaatgacacaaaacatcgattccttactccgtgcgtactacacgaatttaagtgaaaaatacaaacaaatcgcagattacatcttaaaaactgaacatttcaatcaaagtttaacgattcaagaatttgcggctgactgtggtgtttcaacagccactatttcccgtttcgccaaaatgttgaccttcgcaaacttccaggcactcaaaatggcgttacttgctaaacaagcaaccccaacagataatccactcttccatgaaattagtaataatgatgactatctgaccatggccgataaaattttcgcatccaatactaatgcgctcaaagcaactcgttcactactgactgaagcgcaattacggcaagccgttgattatatcaaccaggccaagcgcttaagtttatttggcttgggcgcttctggaatcgtcgctcaagatggctaccacaaatttttacgaactgcgattccaactgtttacagccaagactaccatctacaattgatgcaggccacccaactcaccgaacaagactgtgcgctgattatttcacatagtggtcaaaataaagatgctttagaaattgcacgcatcttaaaagaacgtcacgttccactgattgtcatcaccagttttggcaattcaaccctcgctaaattgggtgatgtgacactgttgtccatttccgaagaaaccaattaccgcgccgaagcactacacgcgttaattgcacaaatcagcatcgtcgatagtctgtttatgatggtcgccgttaataatggcccacaaacagaacaaagtttcaaagccattcggactgaaattgatcggactagacaaaaataaaaaagctgaggttgaagaaatacttcaacctcagcttttttgctgttctattttgaacatctaaacgtgctttttggttgcaccaacttccgcttaataaaaaattggtagtcatcctgaattctggataactaccaatttttattaatgctcagttgctgaacgcaaccaaacgcactctattcttaaacgtgcttttttaaacagcttcctgcgcttaaccaaatttgccaaatcgccgattgcatcggtaattcgtcaaatcctgttaatgctcagaagctacccgtttcaaacgtacttcatttaatttctgctaatgtcttttcaaggtgggctaggacacggtctttacctaacaattcgattgaatcaggtaatgatggaccatgcatttcgcgagtcgttgcaatccgaattggcatgtacaattgacggcctttaatcttcgtatctttttggatgcctttaatgatttgcataatccgtggtgctgtgaataatgttaaatctttcaagcgttcgctgaattccttcaaaacaacggatgctgtttcgttatttaattcttcaagcgcttcggcgtctaattgttcaggttcttcaaagaagacatctgacatttcaacgatttgagctgtgtagctcatttgatcttggtataacgcaatcaaatgacgggcccattcgatcattttgctatcaggattttcagcgattttacccgctttaatcaagctttctaacgaaagatccatgattttgtttggatctgattgtttaacgtattggttattcacccattcgagtttcttttgatcgaaactagctggtgatttgctcaaacgttttggatcaaattgtttgatgaattcttggcgattgaacaattcgctttcgccaactggtgaccaacctaatagggcgataaagttaaacatcgcttctggtaagtaacccaattcgcggtattgttcgataaattgaagcactgattcatcacgtttacttaacttcttacctgtttcagtattgatgatcaatgtcatgtggccaaagactggtggttcccaaccaaaggcttcgtagacagccaattgttttggcgtgttggcgatatgatcgtccccacgcaagacatgggtaatttccatcaagtgatcatcaacgacaacggcaaagttatatgttggcatcccatcgcgtttcatgatgacaaagtcgccacctaaacgatctgattcaaagctgatttcacctttaacaatgtcatcaaacttgtaaacgtgatccttaggaagacgtaaacgaacaactggttgtaagccttttgctttagcagcttcttggctagccttaatttcatcatcactcataccttcgtattcgtagatgtaacgtggtgcttcgccagctgctttttgggcttcccgttcttcagttaattcatcttctgttttgtatgattcgtaagctaatcccttagccactaactcttcaattaaaggcgtgtaaatttcgcgacgttctgattgacgataaggaccaaagtcaccaggcttatctggaccttcatcccaatccatacctagccacttcaaattatctaactgactgttttcaccgtcagcaatgtttcttttcgtgtcagtatcttcaatccgaatcacgaaagtccctttgttgtgacgtgcaaataaatagttaaataatgctgtacgagcattcccgatgtgcaaatgacctgttggacttggcgcataccgcactctgattttattttttgccataaaaaaaacgcctctttctaaaattatacttgtctactagtttaccgttattatgcctaaaaataaaggctcagagaccactaatccacaaaaaaagaatctaggacaaaagtatgtttgtcccagacccttcttctgatagtagaattctatcatttaaacgtgctttttgaaccatcttcctgcgcttaaccaaatttgccaaatcgacgattacatcgtcaattcgtcaaatccagttaatgctcagaagataaccagttcaaacgcactcttccacttaaacgtgcttacactaactgcctcctgcgccttgctacatcagtcacatcaccggctttaccggcaatccgcctgattaggcaaatgcttaaaagcaaaccgttagtgacgcactctcaccgcattaacggagtggtgtccattgccattcttcaacttctggtaaatcagtaccttcattgcgaatgtattgattgtgtttagcaaccatgtcatccattgattgtgcgaattgaccagcttgatcgccaagtacgtcaactgcaacttctttagatagactgaaacgatccatttgattcaagacacgcatgtcgaatggtgttgtaatatcaccattttcacggtagccatgaacatgaaggttatggttgtgacggtcaaagaagatatcacgtactaagccttcgaaaccatggaatgcgaagaccactggtttgtcttttgtaaagtacatgtcgaattcttcatctgttaaaccacgagggtccactttaggtgaacgaagtttcaataaatcaacaacgttaatgaaacgaatcttcatgtcaggatattgtttgtgcaagattgagattgcagccaaactttcaagtgttggttctgtcccagcagctgcaatcacaacatctggttcagcatcttggtctgtacttgcccagtcaataatcttcaaaccattcttaactaagactgttgcttcgtcaattgagaaccattgttgacgtgggtgttttgaagcaaccactaaattgatcttttcttggctcttgaagacagtatccattgttgctaacaacgtgttagcatcagcaggtaagtattcacgaatgaattcaggtttcttttcagctaagtgtgttaagatacctggatcttgatgtgtgtaaccattgtgatcttgttggaaaacagttgatgtggcaatcacgttcaatgaaggatacttgttacgccatgcttgttcatcagccttacgtaaccacttgaagtgttgtgttaacattgaatccacaacgcgcaagaatgattcgtaacttgcaaagaaaccatgacgaccagttaggacataaccttctaaccaaccttcagcttgatgttctgataattgtgaatcaagaacacggccttctgttgccatgtattgatcgtttggttctttgattggttccatccattgacggtttgttgcttcaaaaatatggttcaaacggtttgacattgtttcatcagggccgaagattctgaagtttttattttgatcgttgtctttgatgatatcacgaacatattcgcctaaaacaatcatgtcttgcgcaacgactttaccgtgttctgaattatccacagcataatcacggtaatctggtaagcgtaatggtttaggatcaatcccaccattggtgattgggttagcagccatccgttgatcgcctttaggtgcaatttctgcgatttcaggttttaattgacctgcttctgtaaacaattcttctggacggtatgatttcatccaatctactaatgcatcaacatgttgcatgtcagcactgtcaattggcactggaatttggtgcgcacggaatgaattttcgattggtacgccatcccatgtcttaggaccagtccaacccttaggtgcgcggaagacgatcattggccatactggacgagatgaatcgccgttttcacgcgcattcttttgaattgcttggattttttcgatggcttcatccattgcagcagcagttgctgggtgcatcttttcagggtcgtcgccttcaacaaagattggttcccaaccattgccttcgaagtatttcgttaattcttcatcactcttgcgtgaaagaattgttgggttagaaatcttgaaaccgtttaagttcaagattggtaagacagcaccatcattcttaggattgatgaatgtgcttgataaccatgatgcagctaatgggccagtttcagcttccccatcacccacaacaacagcagcaatcacgtctgggttatctaaaatcgcaccaacaccgtgtgataatgaataaccaagttcgccaccttcatggattgaaccaggtgtttcaggagccgcatgagaagcaacgccgcctgggaatgagaattgtttgaataatttcttcatcccttcaacatcttgagaaatttctggatagatttctgaatagctaccatctaaatatgagtttgagaccatcacttgaccaccgtgacctgggccttcaacgtagaacatgtttaagttatatttattaattgcgcggtttaaatgagcatataggaagttttggcctgagattgtcccccagtgaccaattggttttgccttaacatcttttgcttccaaaggacgtttcaatagtgggttatcttttaagtataattgaccaactgagatataatttgcagcccgccaaaatgcgtcaactttagcaaggtattctttgcttgaataatctgtcattttaatagcacccctttttaattttaaaaaagttcctaatagctttactttaagttccagtcgcagcttttgcaactttgttgtttctgaccactctcttatcatactaaactttttaaaaaagtcaaccatttttaatattgggtcgtaccaattttttgaatctaaaaatagcggccctattcgcgaccgctaaccgtaacgaatgtattatatttcatgtattgatagtgtaggcgcatcgttgaaaattcaaacggtgtcccatcgtctaagaagaaaattccttccatgatgccaactggttccgtcgatttcaactttaagtgcgcttgatcatcatcagttgatggttccgcgaaaattgacaggaaagcgcgtgtgacttcttgatttttctcggtttccaagtagttaaagattgaactcgatacaattttttcggtcaattcgggcattaccttaatcggaatgaagcccgtttcaatcatgaacggttcatcatcaaacaaccggagacgcttgatttcgtaaacaaaatcatctggtttcaggaacaagtcccgttgcaattccgcgctcggcttgatgacttggaaatctaataatttaatccccggtgtccgattaccggctttaaaactgtcggtaacccctaggttagagccattgtaattaaaaaacgagccaccctttaaataaagtggattaataaaggttcctgaaccccgttttttgaaaatgatcccttgattagccataatgtttaacgcacgtttgaccgagctacgactcacttgatagtgttcagtcaacgtccgttcatcgggtaatttcatgctgggaaatgattctgcgttaatcgctttttttaagtccgcgataatattctgataaactaagtcggccatgctaaactcctttataaatcattttatctcaagcttattatacatgattcctaaaagtcgtctacaaacagactcgataaatgttcaattattaatgcaggccaataaaaaaagaggtgctgagacaatgtttattgcctcagcacctcgcgcgctccagatcagactatcttgcaaaaaatgcttcacagcgcctactttttatttaatgtgcttgaaattgagtatagtattctgctagtaattgggcaatccggttcccagtaatggcataattttcagcgggttggttagctaatgaaatccgcaagtagccatcatcagtccccattcctgccccatccatcacaacaacgccgtatttagctgcaagtttatcttcgaaatcaagatagctcacgtgcttttcgaaatagtcgtggaattcatgcccatactttctttcagcaaaatcatagatgttaaataccgcataatattcagcgttttctttagagtgatcacattccatgcccatcgattcccaaaaagcgttgtatcgcgcatcaaccattttcttggaagcttcgatgtatggatccttttcaccttcgtgaattaagctggtcaaactaaatagtgccatcaaaatttgttgtggtgttgataatcccgcggtgtggtacaacgcgatttcacgactgtcagccactgttcgatcaatgaatttcatcgcaagcggattaggcgccacaactgagtaccgtttttcaaaagctgccttaatcgctggttcttcagccgttcgcttagcaataatttcatcaaaaacattatcttggtgcactgctagtaagcctaaacgatgcccagttgccccataaagttttgaatacgaataaactaacatcgtatttcggggggcaattgagtaaattgtttggaaatcattcacaaaagtcccataaacatcatccgtaatgatgataatttctgggtttgcttcaacgacctctttaatcttagctaacgcgtgtttgctgaaagcccgcgaagtggggttcgttggattaaccacaaaaaaggctttgattatcgggtccttcaattcttcaaacttggcgtccatcatttgccagttgtcatcttcaacggaactcacatcgaattgctttaatttatattcacttaattctgggatttgcaaataaggggtaaagattggggtattgatggcaatcgtgtcgccaggccgtaagatatggctgatcttcaattccttgaacaaataaaccattgcggctgttccgccctctgttgggaagacatccgtttgattagctaatttttcaccattatatagtgacacttcaaggtatttatttaggattttttccacattgattaaacttctcgaaggtactggatagtgattgccaatcgcaccgtcgacaaattcgtgaaccaaatcatcctgattgaggcccatgtgcttttcggtataatctaaaaaggctaatataaatcgatctgttttatgactggcatcaaggtaggcatgcagccgttgtgcaatccctgctttatcaacgtagcccgccatatctccatcagcctcgttaattttcttagcagattcttcgacgccaaattcgacaagcttattaaaagctaatcgcgcccgcgtattaatccagttagggtccccacgaccaacattaattggtgcattatgcattgtatttttttctgaattttctaagaacaaagcggcaacttcaaagtttgacatctcttttaatcgctcaatatccaatgagtgcatcgtttttccacctttttcaattacttgctacattcataatcgcatctaaaagcactttaacgctaattgacagtcaaaataacggctagcattgtaaatttattgtttgatttattatatcgtttttgtctcaaaaataaagcactcattcaaaaatcaaaccataaatgccacagcgattctccaacttcatattgcatcatttaccacaaacctgcaaccctgcggcgggattttttctaatgttgctaaaaaagcacatcatcgttcaacgatgatgtgctttttaaagttttaagcgacgttattccttattttctttgaagaacttcgcgaaatttttgcggtaattgtgcaacatccatttaatcaatagccagcgtttgagattcatatctttgctatattcaaaagtggtgccgtaacgtttttgtttgatgagagccaatgccttgtctttttcggcattattgcgggcatatttcttaaagacatccactgaaacgcccaaccaaagtgcgggactgtcttcatctttattcgcccaaacaacaggttcatcttgcaagtcgtttgtcacgtaatcgcgcaccacccattgggctaagttatagccgttcaaggtaacaaagaaactactgcggcccatccgtaaattgatgtcgaataacttgtaggtgttatcgcgttcatcatatttcatatcgaggttggcataacccgtaaactcgatatcttcaaggaatttttggacttgttgataaatttgtgcgttgtattccggcaaaatcgccacgtaattcccaatagctgcgggtgctggatcttccaataatggatggcccagacacatcatcttcacgtgatgttgttggtcaacatagatgttcatcacgtgcatccgactgtcatccccaggaatgaagtcttgtaaaatcatgtctgattggtagccattttcatatacttttcgcatgatgtcttggaattcagcttcacttttaatcgtgaaagcttttttgcgcccttcaaaatgcacatcaagccattccacagaatccgccggttttaacgccactggatattggaaaggttgttccacctgattatcttcaaccatttgcttggtaatgatgtgcgtcttgggataaggtaagtcatatttgtcacagatttcatagaaggtttccttataagtcaacttttctagtaaatcgtgatcaatatatggacaaacaaagacatcttccaattccgctttatgttgtgaaattaagctcgcatagccatcaccacagccaatcaaaatgactgggccatcgctatcgcgatagatttcctttaattttagcatttcagtaatgaatccaggatcttcactgaagcctggaatcaattctaaatcgacgatttttgtaaaccgagttggtgctaattcctgacttgcgtaggccttaacaggttcatgatacatctcataaaacgaacgggccatcccgtaaacgttaaaatcgctccccaataaaatgggggtgaagtttttaccgtttgcttgcatgctgtcaccttctatatcaatatttatcgtagtataccagactgccgttcaatatacgtcagctcaggatgctctttgttaaaacttaattagtaattgctacttgttgtatagcccgtcgacaatattttggccgaccactgtcatcggatcaatcactttgtcgggatacaatggaaattccgactgtgcaacactcaattcggtacagcccaaaataaccgcgtcacaatcatagtcatttaacattgtatcgacaattttttgatacttgtcatggctgaatgtcccagtcgccttaatgtcatcataaatcaaactcatcgtggcatcttgcaatgtttggtcgggaacaacactttcaagaccaaaagcagcaattgctttttgataaataccggcttgtcgggttccggttgtgctgagaacaccgattttcttcaagccgggaattgtttgttgcatgtgtttgaccgtttcccgtggcatgtggataatgtcgaaatctgcggcagcttgtaattcgtcgtagaagtaatgggctgtgttacaggtcattaccatgaacttcggcgctaacaaattcatttggcgaatatcttttaacatcacgggcaacggattttcttggctgttgtcgaggatgtaggctgtgcgatctggaatttcagcgtggttgaacacgacgtaattcagataatcttgatccttcttagccggtgttaattcatcgattagatgtacgaaagtttcggttgccgccgtccccatgccgcctaaaatcgtaaacatttcttccatggcaattctcctttacttaattgacttcatttgatgctggttagtccttcttttgaggactcacttcgatacctaattcttctaattgttccggtgtcacttcactaggcgcattggtcattggttctgtggcccgggaatttttagggaaggcaatcacgtcacgaatattgtcgcgactagcgagcaacattgcgaaacgatccaaaccaatcgctaagccgcctgatggtgggaaaccgaatttcatggcatttaataagtggccgaaacgttcttgagccacttcaggggcaacccctaaaacagataacattttttcttggacttctggatcaaaaatacggagtgaaccgccacctaattcataaccattcaagatgatatcgtatgaaattgcatgtgccttatgtggatcagtatccaacaatggaatatcttcatcacgtggacgcgtgaatggatggtgggctgcaatccatttgccaaagccttcatcatattcaaataatggccaatcaacaacccatgtaaatgcaaattggctcttatcaatcatatccatttctttagcgaagtgtgttcgtaagtaacctaagctatcacaaaccacttggaagttaccggcaacgattaaaattaaatcatcatccattaagttcaaacgttcaacaagcgcttcttggtaaggtaataagcctttagcagaagcccctgataatttatcaccagcgtatttcgcccacaacaatgacttagcgccgtaacgttcaatgtattgttgttgttcgtctaacgctttccgtgaatatttaggggcggcattattaacgacgattgcgcgcacatattggcctgcttcaacagcttcagagaatggcttgaagtcagaatcttgcacgatttctgtaatatcttgaatttgcatatcaaaacgaacatccggtttatctgaaccatacttgtccattgcatcttgccatttcaaacgtgggaatggtgtttgcacatcgatgcccttgacgtctttcataacttttttcaataaaccttctgtttcggtttgaatttcaacgtctgataagaacgttgtttcaacatcgatttgtgtaaattctggttggcgatccccacgtaaatcttcgtctctaaaacaacgggcaatttgatagtacttatcaaagccggctgacatcaataattgtttgaagagttgtggtgattgcggtaatgcgtagaaactacctggataaacccgtgaaggcaccaaataatcgcgtgcgccttcaggtgttgaactcgtcaagttcggtgtttcgatatttaaataaccattgttatcataatagctgtgaactgcacgagtaatcgcagcccgtgttttaatggcattttgcatttctggtcttctaagatccaaataacgatacttcaatttcaaatcttcagaagccgtattgttatctgaaatttcaaatgggagggtttcagctttgttcaagaccactaagtctttaacaatcacttcgattttccccgtcttcatgtctggattaatggccgcttcatcacgcgccatcactgttccttggacttcaacgacatattcactctttaatttacttgctacttggaaaatatctgcatctgtgtcttgattaaacaccaattgaacgatgccttcacgatctcttaaatcaacgaaaattaagttcccaaaattccgttggctttgaacccaaccatgtaatatgacttcttggttgagaaattcttccccaactaatccacaatatgttgttcttgttctcatatttgccaatcctctctgaatctacattttataaaaaataaaaaaagcaccctcgtctttcgacaagggtgctttgcgcacggtaccacctttaatttcagctgttgataacgctatctgctagcgggatattcatccaagcctcaaaagctgtcaactggaatcaataagtaactttcaacggggttactctctctgtgattgatcgctaaaaccaagtactttatcgatggctacattttattataatgtccaaaatatatcacaaagccctttaaccgtcaagttttgcagttggattgagctagctggattcgaaccagcgcatgacaggatcaaaacctgttgccttaccgcttggccatagcccaataatgcggcaccaagattaagttggcgccgtaaattgattgaattgaaacgtgcttttgatgacaacaatttccgcttaatctaaaattcccaataatcctaaaaacccggattattgggaattttgtattaatgctcagttgttaaccgtcatcaaacgcactctaaacgtgctttggcagccatcttcttccggttagctacatcagtcaaatcaccgactttgtcggtaatccgcctgattaggctaatcctcagaagataaccgactgcctgcgcactctttaaattaccatacaaatagtccgactgttgctgctgaaagaagtgatactaagattcctgatagcaacatgtagccgacgtttttggcaatcatgtcgttcttttcacggtccacaaggcctttgaaggcgccgatgatcatgccgactgttgagaagttggcaaatgatgtcacgaagaccgttaagacagcttggtaatgtggtgcgaagctcccgattgaatgttggactttacccatgacaacgaattcgttggtcaccaacttcgtccccatgaattgtgcaaattcaaaagcgtggtgcacatcaagtcccattaaccatgcgaatgggaacatcacgattccaagtaaatgttcaagggtaatccaagggttcactaattgaagcaccttgtcgatcaaggcagccaacgcaacaaaggcgatgacgtttgccgtgataattaaaaccaatttaccagcatttaagattgaatcacctaagaatgagaagaatggttcacgttccactttgccttcaaccatttcggttgcttcaacagctgcggaaccactcccacccattttagcaatcgtatcttcttcgggtgtgactttcactgggtttaaaatattggtgacaataatagcgttaataatgttgaccggaatcgccgttaaaataaattggcccggcatcatttgtgtatatgcgccgatgatggaagctgtcacacagctcattgacatcatcgcaagtgttaatgttcgttctgctttcatttgtttcaattgtaagcttgaaacagctaatgcttcggtattgcctaaaaacatcatttcaactgcaaagaatgattcaaactttggttgtcccgtaatcttagctaacccacggcctaaccatttaatcacccaaggcaagaccccgatatacgttaagatatcgaataatgggataatcatcaagattggtaataacacgctagcaacgaaatccatttgtttcacattgacccaacttggtagtgcaaaagcaatcccagtataggcaacttgcactaaccagttaaagccgtttgctgcacctaaaacaatatcccgcccgattgaaaaactcgttaaaaaccaagcaagcactaagttaatcactaacatgattaagacggagcgccaatcgatttctttctttttctttgagaacagaaagccgactccaataaaaatcagtaatccaacaacatttacaagcaaatacacgacacgccacatccttcatttgtctttttcgtaccgctttaaataataccgttcccccttgtaaatgtaaactattgttcaccccctaattgcataaataatcacttgttaaacgcaactaaattagtccacaaaaaaagcggtccccttttgcaaaggaccgcttttccattcatttttaatagcccgcattccacagatttgtagactgttgcatttgccaagtattggtggtgttactgtaatcgttgttaccactataagttgcactgttcgagtagccatagttactttgcgtcgtcgttgcagcactctttccaccattcatgacactttcagaataaaccgtaaactcttgatgattttcttcacctgtaaaatacgtgttcaaatcattttgtttagtttctgcgttgttaatcgttgttttttctaatcccagtgacgttctcaagacatctgaaacgcgttggatttcttcattggttggaatctgatacgagctaccatcaatatcagcattacgtccagttaaaacatcagactcaattgatttagctgcctttcgataatttgcttgaatcgctaccatgtcatcaaaactgaggttagtggcaacactatctgacaaggagtctaagatagattcaaagttggtcaaagatttaagcgagactgcagaattaatcatagacgtgataacttgtttttgccgtttttgacggccataatcgccttctggatcatcgtaacgcattcgtgagtagtctaaagcggcttttcctttcagatgcatcttgcccttagtaaactcgctcccgttccattcgaacgtaaatggtacgtcaacatcaacgccaccgacagcgtcaacaatcttcgataagccccccatgttaaccgtgacatagtaatcaattgggacatcgaacatcttttcaaccgtcgacatcgccatatcagaaccaccaacattataggcagcattaatcttctgcatgttaaattcatctgcgccttgtaactgcgctagcgtatcccgaggaatgctgaccaacttgacctgctctttatctggattgactgtcgccacaatcattgtatcggaatttcctttatcaactcggccctcagcaccagtatccactccgagtaataaaatagagaatggttttttatgtttaatcgttttagcggcttttttagtcgcatttggtttataaattttattcgctgcagacttcacttgattactgatgcgtaatgcatacgcgccgccaccgaagaggactagcgttagaatgagtatcaaaactttcatcgtgcgatgctttttaacttttttgtagtttgcttctcgagatccgaaaaatttagaattctgcataggtgtttcccttctattatgtatcataccggcattaataatgttatgttgctattatagcggaattatcatttcaaacaacgccttttaagaaaagttacacaattttaataattccttcaattgttgaacaacactttcctaagcgcttttatgctaaaatgtaagcaagtcttaattatggaggtttcatatgtcaactcaacaactccccatccgcgatgctgttccagaaaagctcacatgggacttaaccacgattttcaaaaatgatgcagcttttgaagtagcctttaagaaagttaaaacgcaattacccacactcaaaacacttgatcgtccgtttgaatcggctgatcaattagtcgctacaatcgaacaaatcttagccactttccgccagctcgaaacaatttacgtttatgctagcatgaaaaatgatcaggatactgctaacgcaacttatcaaggctatcaagcccaagtggacagcttagcggccgaagtttcagccgccgctgctttcttagaccctgcgattctcgcaattcctattgttcaattgaccacttggttgtcagaatcccctgctttagccaaatacagccatttcattcaaaccattaccgatagtcgagaccatgtcttatctgggcaagaagaagccttgttagctgctgccggtgatatcttcagtgctgctagtcaaaccttcagcgtcttagacaactcggatttacaattcccagaagtgactgacgaaaacggacaaacgtttcagctttcagacggggtctacagccaacttttgcaatcagccaaccgatcagtccgccaagcagccttcgaagcactttacaaaacttatggtcaattcaaaaatacatttgcgacgacgcttgccactgaaatcaaaggtcataattacttagctcaagtccatcactacgatagtgcacgccaagcagcgctagcacccaaagcaattccagaagccgtctatacaaccttggttgatcaagtgaaccaacacttaccacttttacatcgctatactgaattacgcaaaaagcaacttaatttatctgaattacacatgtttgatctctacacaccacttttaggaaaacccgcattaacctacacttatgagcaggcgcaagcaactgccaaagaagcattgtcgatcctaggacccgattacgccaaacaagttgcccatatttttgatgaccgcttaatcgatgtttgtgaaaaccaagggaaacggagtggcgcctattctggcggcgcttatgacaccaaccccttcattttattaaactggcaagatgatttaaacaacttatacacattggtccatgaaacggggcatagtgtccacagcgccttcacccgtcagacccaagattatgtttatggcgactatccaattttcgtggccgaaattgcgtcaacaaccaatgaaaatctcttaacggaatatttattgcaaacacagtctgatcctaaggtccaggcctatctattgaactactatttggatggttttaaaggcactgttttccgtcaaacgcaattcgctgagttcgaacatgcgatgcatgctgccgctgccaatggtcagccactaactgccgagttcatgtcacaacaatatgcggacattaatagccgctactacggacctgccgtcgttaacgatccacagattgcccttgaatggactcggattccacatttctacatgaactactatgtttaccaatacgcaaccggctttgctgctgcaacgactctcgctaacggtattagcaccaaacagcccggtgctctcaatcactatttagactacctaaaagctgggagctccgcctacccaattgaaattatgcaacaagccggcgtcgatatgacgagtgccgactatctcgaacgcgcttttgcagttttcgaagaacacctggatcaactcgaagccctacttgctaacctaaattaagcctcatgaaaaagagagtgggataaaagtcgggcaatttgtgagcattaactgaaaattgaccattatgcctgaatttggcataatggtcaatttttggttacgcggaacaaactgtcttttggcacacgttttggctctcttgaagtcaaaacaccaaaacaactttttaagaaccttttcatccttgaaaagcatttttttactttttcccagcctctttttatttctgtgctatactaggcattaaaagtgttcattaggactgtccaaaaggagaattggaaatggctaaaatcggttatgcgcgtgtgagctccaaggagcaacatttagatcgacagttagtggctttaaaagacgttgataaattatttacggataaattaagtggggctaacactaatcggccagaactgcaaaaaatgctggcctatattcgtgaggaagatccgatgcgtaatggtcaaacaaagccagcgtataatcttcaaattatgactagctcacagtacgtgctgggttatgaactcatgcagaacccaaccgatactagaacattaatcccattcttatctcatctcgcccagaacgaagttttggggcgagaaattgttgccgatgctggttacggatcagaacgcaattataagtatatcgaagatgagctatctgattgtacagctttaattccttacagcaccatgattaaagagaatagccgtaagtggcgttctgatgatcgaaaagtaatgaactgggaatatcatgaggctgatgacttttatgtaaacccacagggcgtccgattcaactttaaacgatacgcatatcgaaatgataaatacaaattccgtcgtgatttcaaagtatatcaagcagagaagtatgatgagaatcatcaaattatttctcaggcattaacaccacatgggaacactaagtacattatggtgaacccacagtgggaatattttaagtcgaaagctcgcgagtcgctttcaaattccaacacttactcccgtcgtaagtacgatgtagagactgtttttggtaacttgaaggcttatttgggttttaaaagattcacagtacgtggtcttaagaaagccaaaagacaaattgggattgctttaatggcattaaacatgaagaaaatggccggaaggccgctcattttctcaaaatattcagataatcaaaaggtgctgggaaagtgcttaaaggactctttaacaccacgggcgcaccagcggagttagcaaccagaggccaactgcttcttagtcagggaatgcaggggcaccagctggctccagacggttttgcgataacaattgaatagcgagtagcgggatgactggacagccagccgctgcattcttatcattaaaatagcaaagtgactgggcggtacaatatccactacctgtttaatggtctgtacgggggcctggtgttcgccgggatcttaatcagcttggccctgggaatcacaaccaccatcgtcatctacttcaagcagatctccgagggttacgccgaccggtaccggtttaagacaatgcaacaggttgggcttagtgaacgtgaaaccactaagagtatccacagtcaggtattgatggttttcatgctgccgattgccggagccgtcatcaacctgctcttcgcagcaccagccatcaagcagatcatgactcagctgagtttctacaacctcccgctgatgatcacagtcgcagtatcgatcaccctggccctcttggtcatctacctgttaatctacggctttaccacccgcgcctaccaccagatcgttgataatattcattaggtcctaatgcccactgccatcacggctggtgggcgtttttatatcacaaatagatattgattgacttcccatgctaaccaggttagaatattgctaacaataaataagtatcaagtaaaaaaggagtggtcccaatgttaaaaattacaaattcaattcatccgtggtccactagctgctgttgttaatcatcctgtgcccgccccagcccaactggggttctttggcttattcactttttgattaacaacagttttttagtgcccaaataacaacgaattgaggtgataaataatggccactccccagattaagattgggattctcaacctgatgcacgataaggttgatacccagaaaaggttcacgaacgtctttgcccacactgcctacccagtggagttgaccttcctgtacccgcaaacccattaccgtgaccggacggttcctgacttggttcaacagattgctcaacccctggaccttgcccgggtcaacgagtttgatgccttcatcattaccggggcaccaatcgaacaactcgactttaacgaggttacctacattgacgagatccaccagttgatcgaccagctggtaaaattcaatatcccgcagctctacatctgctggggagcaatggccgccgccaactacttatacgggatcgagaagcaccggttaccggagaaactgtttgggatcttccctaaccacattgtcaaccaggggccgctgctgacggggctgccggatggcttcctggcaccccacgcgcgttacgcggagctagatcaccagcagatcagtgtccatcccgacctgatcctcgaggccaccaccatcgatgatgacctcttctccttccgggcgcctaagtaccagcagtccttcctgttcgcccacctggaatacgagcgggaagccctgctgaaggagtaccggcgtgagaagaacgcctacccggaccgggagtacgccaagccgcaaaactacttcctcgaccccattcatatgaagggaccacagttcaagtggcaaccggcccagcacatctattttgataactggcttcaaaccgttgtccacagcatgcaaaacaagaaattagtaaaggagtaattaattatgactaagatcgttaactcaatcaccgacctgatcggtaatacccccatcgttaagttaaaccgcgtcgttcctgaagacgctgctgatgtctacgttaagttggaattcttcaaccccgctggctccatcaaggaccggatcgccctggcaatgatcgaacgggcagaaaaagagggcaagctgactgccggcggtaccatcgtggaaccaacctctggtaacactggagttggtctggcaatggtcgctgccgctaagggttaccacctggtaatcaccatgccggaaaccatgagtgtggaacgtcgtaagctgatgcagggctacggtgctgaactgatcctcacccctggtgctgacggaatgaagggctccatcgccaaggccgaagaactcgtcaaggagaagggctacttcatgccaatgcagttcgagaaccctgctaacccggctattcatgaagcaactactggcgctgagatcatcgatgcctttggtaaggataacctgccggacgcctttgttgccggggttggtactggtggtaccctgaccggaatcggccacgccctcaagaaggctaaccctgctaccaaggtttacgctctggaaccagccgaatcaccacttcttaaggaaggccacggtggcaagcacaagatccaaggaatcagtgctggcttcatcccaaaggtgctcgacaaggacgtttatgacggaattgttgaggtaagcagcgacgatgccatcgccacggcacgtgaagtggcccacaaggaaggaatcctggttgggatttccgctggtgccaatattaaaggtgctatcgaattagccaagaagctgggcaagggcaagaaggtcatcaccgtctccccagacggcggcgatcgttacctgtccaccgacctgttcaactactaaaatcagacataactaaaaagaggctgggaaaaaactcctagtccaaagcaaaaaccggatgatgaattttttgaacaattcatcatccggtttttatgtacacaggaaatcgttcctgatatgatgtaattaccacaaaacaacccaaaggagcgattttcatgtatgcatgtatcctaataaagtagacaccttttttgctatactattaattatttagacatcttttgagaaaggaattttgattatggtagacaagcgtaaatctccacgaaaatttgacgaagagttcaaaaaatcaatcccaaattgcaagaacaaattagccacacgataaatcctattaaatcagtattttcattaatattcatattttatggacttaacttaaccggcggaagcagcggagaaaagctctttgggtgtttgatagccagtttgccggcgtggtaaattgtttagctttgactcaactgcttggatatcatgaggacccaaaatatccatggatagacccttgggtacatcgcggcggatcattcgattatgcgcttcgttagtcccacgctcagaggaacgatatggatgggcataataaaggtcagcgacaccggtaagtacagcgccaacttccgagaactcagcgccattatcggcagtaactgacttcatgattgatccgtattcttgacagatcttggccagctcatagttgactgaatcggcatcacgaccatcgatcaaacgtagaatttggcagcgggattgacgctcgatcagcgttaagatcacactctcttgaccgttgcgcttgcccaccacggtgtccaattcgaaatggccgaactcttggcgctggtcgatacttttaggccgttcatcaatactccgtccggccagacgcttgtgcttgatcgagtgatgatgtttagcacggtggcgcgttttttcgagtagatcaagattacggacttcaagtaactgggcatcaatatagtggtatagcgtcttggtcgagaccatctcctcaggttgatataagccttcaagtttggcccgtcctactgctgcatcaggcgaccaaccatcttgacgcaaatgagtcgtaaaatagtcgataaaatcagcgacaccgacgagtttcaaaggtcgatgacagtgggctcgattagcttcgtacttagcttgtgctgtttctggtgagtatacagcgtaatattggcgttgaccattcactttttttacttggtcgatctcgccgcggcacaattcattattgattgtttgatgacaaacattaagcgctctggcaattgcacgattggaatagccttggctgtgcagcgtagcaattctgcctcgttcaaacgaagttaggtgctgacctttttttctgactgtggtattctgttcttgcatcaagacaataacctctttcattgtttgtgtaggaacatcaatgataacagagatttgtcttggtgttttttattttatcaattagctaaaagtatttggctaacttgattataaaacgcgcgttcaaaaaatcaatcgtaaaactttatgaaggcggcaaatcacaaaacgcattagctaatgaatatggaatcgccctgtcctctgtagctcgttgggtgaagcaatattctgaagttaaaattgatgatgatacgatcctcacggctcgacagatcaagcaattacagaaacgaaatcttcagctagaagaggaaaacttaatcttaaaaaaagcgattgccatattcacgccacactcaacgaacgactaaatgcaattcgtatgttacgtcacgaacactctattgttacgctttgcagggttcttaaggttaatcgctcgacttactacaaacgtttttctggaaagatttcccccagaacagcagaaaatcaacagttgagaaagacaatcttagaaatctatacaacttctaaaaaacgagtaggtcctgcaaaagtacgacgttgagccagtctttggtcacatgaagagggattttggcatacgccgaactcatctacgcggacaacgggctgtggaaaatgacattgggctagccttgatggcattaaatctaacgaaatttggtcaatcaattagtcgattggcgactaattttataaataaggcaaattacaagtttaatccgaacaagcccggaatctttcaatggcagtctgttgatgatgtatttttaatggtcgttgattaattagttcaagtgctgctaggatctcatcagtcgttacttggctaaaattggtctttttcgggaagaaccagcgtaaccgtctattaaaatattcattggaacctcgctcccatggtgaatatggatggcaaaaataaactttgatctgataatcctgttctaaggcctgataattggcaaactctttaccatgatcaacagtaatggattttacttggggaccgaaggcccccataaacttgccaaaggcggtgtttagagccttagccgttctattaggggctttgatggcccatagaagtcgggtcttacgttctacgaatgtaaccagacatgatcgtgactcacttcgactagaaagcaccgtatctacttcccaatgaccaaaagctaaccgttgattaacagttgttggccgttgttcgatggaagtcccacttgtaaatttcccacgattttcgctcactcggtgctggcggacattccgattgggtagatcagtcaatttgaaggggagccagccacgattaagccaattataaattgacgcagtgctcaagttataagcggccgcaatggtttctggtgaccaggttaatcgtaagtgattggtaattaaagtcgctaatgctgccgtcagcatcgaacgacgaccgcaattccgccttttgcgatccgcatcttgctgagctaattctggatcataaggtttaactcggtccaactcatagctaatcgtagctttggcgacgcctaaggcgtcagccattacttggtaagatttattcccctcattgaccagttgtgctagtgcgccacgttgaaaacgtgataaagtagatgtacccaaagtaatcactccctatattggttggaattagctactaccattgtaagtgattgctttgggctttttaatttctgttcggattaattatagaatttgccataatttaaaatccggactatgatttttgaatcgatcaaaaattatagtccggattttactgttagagaaccaagaattaatagttaattcccagcctctttttttaacggctaattcgtcgatgatataacaatgcaataaagtaaaagccaaactcaatcgtggcgatgaagaaggtcactggccagttcgttagataaccaagccataaaccgagccaaacccctaataacgctgcggcaaccgagattgccaacatcccgggtacgctcttcgctaaatatttagcaatgaacgccggaatcgtaactaagatgaatactagtaatgaccccacaatctgagcagcaatgctgacactgacggctaataaaattaagaaataaatcgatagtaagttggtctttaaaccttgtgcttgagcgccaatcggatcatatgaatcaaataccaagtaccggtaaaagatcaacagcccaatcataattgccccagataagatgattaattgataaacatctgctaagctaatgccaataatcgaaccaaataaaatattggtagcataactagcatttcggtttgaaagggataaaaagagaatccccaaaccgacaaacagacttgaaatcgcactaatcgacgcttctcgccgtgattctttggcactcatctgaccaatcgtgattgaactgagtaacgtgaacaataacatcccattcaatggtgcaattcccatgaaaaccccaaatgaggctccggcaaatccaatttcagatagggtatgcgctagaaatgacatgttccgcgcaacaacaaataccccgattaaaccgcaggtaattgcgataaaagtactggcgacaaaggcatgccgcataaaatcaaaagttaacactcgcttatcctccgctttaatctaattccaaattgggatccaactgactcattggtccggcttcatattgacctcgttttaaaaataggtattgatccgtgtatttccgggccaattctaaatcgtgggtcacaaaaataaccgtcaaaccatgttcccggttcaactctgcaaccaaggccatcacttcttctttagtttcaatatccaaactcgctgtcgattcgtctaaaatcaacaagtctggtttactgattaatgcttgggctaaatacgctttttgcttttcaccaccagaagcattccccacggtcgtcttttgcaacgcggttagatgggtctgttctaaaatttgatcaagcgcttggcgttccttgcgcgatttccacggtaagtggctatcaagttgattcaaactcacaaaactacgaatggacaacggatattcagcttctaaatttctaaactgtggcacataaccgatgtttagcttttgcttatccgggttaaaaacgagttgtccttctgtcggttgtaaattaccgattaataggcgcaccaaagttgttttgccaaccccgtttggaccgattaaactcgtcatgctaccacgttcgatcgtaaaactgagatcttttagtacttgtcgattactaaaggcaagccctaaatgttgtgcattcactaattctgtcattttgaatcctgagcctttctaactgcatcaaattgctgttgcatccatgttaaatatgtttttttagcgggtagtgtttcagttacttgtacaactggcaccccttctttatccgctagttcgtgcatttgtttaataatgggactttcttcttgcttattaatcactaaaaaggcaatctgatgggttttaattaaatcccgcatcgttgtaatatcttttggtgatggatcggtcccatcttcaattgctttggcaaagtgttggttagcgactttgtaacccatttcagccaatgcatagtcaaaaacgggttcactaacagccacttgttttcctttggcctgcgcctttagttgttggagttgtgcgtctaacgaagctaactttttaagatacaccgcaccattttgctgatacgttgccttatgtttcggatcgcgcttgctaaattcagtcactaatcgcttggtcaatgttggcatcgtctttaaatcataccataaatgttcgttagcgccattagattgtttcattaattgactgactgtcaacacagtttggtcatctggttgggcactcttaacgactttgtttaaccagctgtcgtaaccaagcccgttttgaatcacaatatccgccttagccacgagtttagcatcattggttgttgcttcgtatgaatgtggatctaaactgggactattgataatcgacgtcacgtgaccttgattacctaaaaccgcttgtgcggcctcaccataaaaatcgagtgacgatacaacttgaatcccactcgcctttttcgtactctgaccacaaccagccactaatagcattagcagtaagattcccgccatgatttccaaaccttttttacgcatctttttctcctcttttctaaatcgtaattattacgttttactaaaaatattttacacgagtctcactaattgtcaatcatttttctgaaaacacttaaaaagggattgggacaaagattgcttttgccctaaccccttttttgaattgttgaactttaaacgtgttctgtaagtcattctcctccggttaaccctgagtcgcaaacaattactacaattattcacgctctgtgttaatcctcggagtatcccgacttacgccacactctttaattaccagatttgttccactgcacctgttgcttggacaacaaaataacctgcccgtggttgatcttcgtttggtacgtaaatattaatgagatagccttgttgtccaccgcgtgtgattaagccattattcaaatacgatgcggtttgaccaaattgtgagccaacttgttgaaccaccaacttaatcgcttggttgccatctacggcagttgtttgttgtggtgtcgtggtagtcgttgttggtgcactgctgctagattggctcgcagattgactactgctacttgccgttgtagcagttgatgaacttgcttgtggggactctacttcagttgaagatgccatcgccgctttggagctcgcttttaattggcttgcactacttgaaagttcactttcgcgttttgcaacactactttcacgtgctttgagactagccgtggttgaactttgcttggcatcagcatcttgatttgccgtactactttgaccacaggcccctaataatagtagtcctgataccaaaactgtactaactgtaaccatctttttcataataacccctccaactcctattgattcatctttattctacgagacacacctcagaatagcaattaaatccacatctgatttaaaaatctttaagaaacacgctgattagcttaacttagcagccacttgcttggcaatcaccatatcagttggatatggtgtatcgaccccgcgtactttctgataagcatcggcccctttagccgctaagacaacaatttcgcccggtttactttccgtaatcgcctgttcaatcgctgttggacgatcaatttcgatggtggttgtcaccttatcctggtcaatcccggccaaaatttcagcggcaatggctgctggatcttcaaatcctggatcatcagtcgtcaaaatggcccgatctgcatattcattaaggacttgcgcaaacccagcacgtctagaaacacctttatcgccaggactaccgacaacaactagtaggcgtggttgattgtattccttttgcaagaaactcaagagcgccttcatgctggcataattatgcgcgtaatcaacatatacttgaccatgtcctggaacggctaaggtttccatccgtcctggaatctgcaagtcgcgaatcccttgttgagctgcgattaaatccgcccctgccaaaccggcaccaatcactgcagctgtcgcgttactttcattgaaatccccaattaaacgcaattggtaatcaccagaaacaccaagctgaatggctcgttcagaagccgcggtaactttaaaccgactttctgctaagcccgtttctagattttcaaagcggaaatcaaccgccaccggaattgtaggttgataatccgtttcggcaaataagtaaattgattccggagcagtcgtcgtagttgctgcagcatacacatccgcaaaatattgcgtttgcgcgttaatcacacagtgtcgtgagttgaccaataattgtaatttgcagtgtaagtaatcttcgaaattaggatgttcatttggtccgacgtgatcaggcgaaatgtttaggaaaaagccaacatcgaacgttaagccgtacactcggtttttcttatacgcctgtgacgaaacttccatcactaagtgcgtcatcccgttttcaactgctttgcgcatgtcgcggaataaatctaaactttctggtgtcgttaaatccgatttgaagcgatcctctggtttaggccctaagacacgatcaattgttgaaaataatgctgttttttgacgggtcgccgcttgtaaaatcgattgagtaaagtaggccgcagttgtcttgcctttggtcccggtgtaagccacgataaataaatcatcttgtgggtaatcataaaaagccgctgataaaaccgccatcgctttttggacgttcgtgacgattaaggcgttcatcccgttgccttcaacaatcgcttgttcggcaacatatgttacggcccctaattcttttgcatttgttaaatagacgggacgaaaattccctttacagaaaaagagcgtatcctcagttacctgccgtgaatcatacgcgatgccggtcatatttaaagtcgggtcaccattaagcgccacacttttcaataaatgatgctcttttagaattaacgtacatgcatctaatgttaaagccattttcgtcctcctcaaaatccttgtgaatggttttaattatagcacgatttaatcatgctgcgcttgaaacggcttataatcgtagccataaaaaaacgcgccaccgttaagtgtcgcgtttcaattccaactaaaataggttcgtgaaaaattctttgatcccttcaccgattaaaacaaataaattggctttggggtccgccgttttagtgcgtaattgtgattgtggcgcttgtccgatataccgcgtagtgacaccgttcaattgtggtgtcacttgaccaatttgcacattctttttaataggtgcttccaattggcgttttgcaccacctttgactgcttggtaatgccagtcaatgttggctgctgtggttccttttggcacccacattgaaatagctttgttcgtaatcaattgcactgtcttttggcgaccatatttaaccgtcgctgtcttataaggtgcgagactctgattggcttgtgccaattgtttttgttcccaaccatcgaagacatattgcattaacttgttagtttcaatgaaccgccggccagtatcttcaccattggcatgcatcaccactgttagaatccgttgcccatctttcgtcgcagttccggtaaaacaatcgcccgctttgtccgttgtcccggtttttaaaccatcgaccacgtagtcttgcggtgcattattttcgccaggtaacattaagttccacgttgacatggccgtttcatcacttgtttgggcgccaaatgtaaaatgcgcttgcttggttgtttcgagaatttcaggataatcagccaacaacttttgcgctatgagtgcgacatctgccgcactcatttcattttcagcatcagccggactgcctggataaacttcagcgccgaggaattcattgttcaagccggacactgaataaagttgtgcgtcttgaatgccccaatccgccactttttgccgcattaaatcgacaaaatccttttgtgaaccggccacttggttggcgagcatcatggctgcatcattcgccgaagcgaccatcatggcttggaaaagtgccttgacggtatattgtccgtccgcttgtagaggcacattcgttaaatccttattttgactcaattgataaatgaggtcatcgggcttcaccgtttgttcccacgttaacttaccttgcttaatttgcgctaacacgatgtaggctgtaatcatcttcgtcatcgaagcgattggcaacgcctgatccgcattttgttcgtataagacttgtccagttgctgggtcgagcgcaattgctgcactcgcatcgatttgaggggcggtcggcaaactcaccggcgtacttgccgctgcgactttggtagtctgggcactcaaaagaccgcccacgggtgcaattgccaataggccgaccattacatattgtactaattttttaaacacaacattactccttaactgattttgcgccagcagtttgaggatcaatccgccgacctaacttcaaaggtaagtgtatcacaaaactggttaattctggcgtcgaatcagcataaatataaccgccatgtaacgcgacaatactttgggtaattgctaacccaagtccagtgccacctgtttcttgtgaacgcgatgcttcaacgcgataaaagcggtcaaagagttggttcaatgaatcacttggaatttgttgaccatcatttgacactttaataatcgcctcttgaccgattttttcagccgccaacgtaatttgtttgccacccttgccatatttcaaagcattagcaattaaattattgaagactcgaccaagcttttcagtatcggcttccatcatcagtggtgcaggattacaagttacattaatctgcatccccttcttattcgcttctaactcaaaactggccgctaattgatctaacatctgctccatatcaaacgttgtcttggtaatgggagtcgatgtttgccgcaccttcgtgtattcaaataaatcctcgactaaaaccttcatttgttgcgccttcacgaaagcagtatgcgtatatttggttagttcttccttggtttgatactgattatcttcaattaaaccaagatatccgatgattgaagtcagcggcgtccgcaaatcatgactgacattggtaatcaattcgtccttactcttttcaatcttgcgttcttcttccattgaacgcacagtactatcaaccagcgtgttcacactatcgatcacgcgttgcaaatcacggttgacacgcaaattaatccggtggtccaaatgaccatcggcaatgtaatgcaactcaccaatcacgtgccacatctgcatttgatggtaacgccgaataagccgccaatagacgactaacacatcggcaacccccatcaagatgacaaaccaattttgccaactccaaatatgccattcattcggaccaattgtaatggcgtttttaatcatccatacgccgccgcttagttgcggattattcacaatcgcctgttgtaacagcaccatgattgataaatttaatagtaataacaaaataaccgtgatgataccctcggcaaagagttcgctcttttccttagcggttagtgccactttttgcaggttcttttctccttgatagtcagccattaaacttctaccttatacccaacaccccagacggtttcaatcactttttcaccatcggttgcttcttcaattttgtcgcgcaaatgacttacatggaccatgaccgtcttggcagagacgatactttcttgtttccagacccgttcaaaaatatcgtccgctgaaaagacccggttggggtgactggcaagtaagtataaaatcccaaattcaagtgcggtgagttggatttgcttgttattaatcgtcgtcacttcatgtgagtcgcgcttaatgataagcggaccaacttctaagacatccggcacttcgttggccacttgttgttggctccgccgtaacaatgacttcacccgcgccatcacttctaatggattgaatggttttgaaacgtagtcatctgcaccggttaggaggccttgaatcttgtccatatcagttgtcttggcagacaccacaataatgggcacttgtgaatccttacggaccgccttaatgacttcgataccactcatattcggcatcataatatccaagatcatcaaatcaatatcgggattcgtggcaattttagtcagggcttctttacccgtgaaggcttgaatgggttcgtaaccttcgtttttaacataaatacttaataattcaacaatttctttatcatcgtctacaattagaattttcataatcgttacctcgtttaatttaacatcattttgcatgattcgctttcattgtaacaaactatcttctacttagggttaaagaattctttaaatcctccccatcatttaaccacaaaaaaaggatttaagtcgtgcaaaacgctcgacttaaaccctgatagaaatgatttgaattaacgtgctgaatagttaggtgcttctttggtaatttgcacatcatgtggatgtgattctgtcaaaccagcatttgagatttggacaaattgtgcattatcttgtaggtcctgtaaattagcagcaccaacgtagcccatccctgaacgtaagccaccaagtaattggtaaattacatcgccgagtgcacctttggcagccacacgaccttcgatgccttctgggactaacttgttggcttcattcacaccactttggaagtaacggtctgatgaaccatgcgacatagcagccaagctacccatcccacggtatgttttgaaacgacgtccttgatagatttcaaattcgccaggtgcttcgtcagtcccagctaacatactaccaagcatcacaacgtttccaccggctgcaagagctttaacgatgtccccagaatatttaatcccaccatcagcaatgatggttttgccatattcgcgggcaacactggcagcatcgtagatggctgttaattgtggtacaccgacaccagccacaatccgagttgtacagattgaaccagggccaatccccactttaacaacatcaaccccagcatcatacaaggcttttgtgccttctgcagttgcgacattcccagcaatcaaggttgcttcagggaagcgttcgcgaatttcactaatcttacgtaacacaccagctgaatgaccatgcgcagtatcgataatgatcgcatcagcccctgctttcaataaggctgcagcccgttcaaaagtatcgcttgtgacgccaacagcggcagcaactaataagcgaccatattgatccttagccgcattcgggaattcttgcactttttcaatatccttaattgtgattaatccggctaagcgaccgtcatcaccaactaaaggtaacttttcaattctgttttgttggaggatttgttcagcttcttctaaagaagtgccgacaggtgcggttacaagtgcttcgtgcgtcatcacggttccgatttcagcagagaaatcagagataaaacgtaaatcacggttcgtaataatgccgactaattttagatcatcgagatttgaaacgattgggacaccactaatacgatatttacgcatcaaatcttcagcagcactaacgggtttatccgctgttaaataaaatggatcaataataacgccattttctgaacgtttaaccttcaagacttcatctgcttgacgttcaatactcatattcttatgaatcacgcctaaaccaccttgacgcgccatagcgattgccatgggtgcttccgtaacggtatccatgctagcactcataattggtgtgtttaacttgatattctctgcaagttgcacccctaaatcgacttcgttggggagtacatgactctccgcaggtattaataaaacatcatcgaacgtaaaccctttttttgtaaactttgattcccatgcagacataatcttcctccaatttgtgaactaaattaaccgccgacccatcgattgttcgtattatctttaatcgataaccagtttaaaatttgataaaatattagcagatttttctgcaaacgtcaataaactcttattgaaaattcattttcatcaatatcgtgtacgaatgaatcacgaacatttaaaataagggtgcacaccacccagcttcgttatacaatagaaataactgattataaaggatggattggcatgcaagaacaacaacgggttctagatttaacacgaagttataacctacgcgaattaggcggttaccaaacggttgatggcaagtccgttaaatggcacaaattattacgttcaggtagtttgaacgcgctaaccgcaactgatattgaggatctcttaaattacggtgttgcttacgatgtcgatttccgttcacgtcatgaaatcaaggtcgcccccgacccatttgatgacaaccaactaacctaccatcgtctttcggtatttccattcactgaccaagccgatacccctaaaaagccagccaaaaaaggcctaatgcggctttttggtaaaaaagaagctgctactcccgaacgatcaagtatggaccggatgtaccaacaattggtcaccgactcccatgctcaagcagcttatcgcgatttatttaccgtactattaaataatcacgatacaaacggtgcagtcctttaccattgctcagccggtaaagatcgcactggtgtcgcaacttttttaattctaagtgctctcggcgtcgactggaaaacaatcgttgccgactatgtcctctcaaatgaggtcctaggactcagctcagcaaccccaacccgaatttcaagtaacgatagccaggtcgcttcaatgaacgctaagagcattacacaggctaatctagaacttgtccgcgacacgattaatcaagaatacggcaacatcgaaaactacctatcaaaggcaatggccctcaaaccagaagaaatcaaacaattaaaagaggactacttagaatagcgtgcgactgcaaatggttatccgctgaggattagcctaaaaaggcgaacacaagcaattgtgttcgcctttttgaatgatcttttaatgactcttaatataattttcgccatccgctgctggtgcgacggccttgcccaagaaaatcaccagaataataatcgtaatcgcgtatggtgcaatctggaaccagacactattcacaccggccagtattgggatgtagccgccgataatcggcaaactttgtgcgagtccgaagaaaatcgatgcacctgtcgcgccaattggatgccacttaccaaaaatcatcgccgccaatgccatgaagccctgacctgaaatcgtcgctgcgctgaagtttaacgtaatcgactgcgccatcaccgcgccaccaatgccacctaacaaaccagacaacatgaccccgatataccggtaacgactcacattgatgcccagtgtatcggctgccgctggattttcaccgactgaccgcaagcgcagcccaaaccgcgttttatacagcacataccaactgataatgccgaccaaaaccgcagcgtaagccactaacgacgtcttcgtaaataaaatggggccaatcactggaatttgggccaagccggggaatgtgaagttaccgatgctttgattaatcaccggcgtttgccccttaccgctatacagcacacgggttaagaagacacacaatgcaggcgccaataggtttaacaccgtcccactaataatgtgattagcgcgcaatgttacggtcgctaaagcatgtaataaggagaacagtgcaccaaacagtccaccaaccaataaggcaatccacggcgtcaatccgccaaaaaccgtactaaattgaagggtaaagacggcactgctgaaagccccaacaatcataatcccttctaaaccaacattaatcacaccgctatgctctgaaaaagcaccacccaaggctgtaaaaatcaatggcgccgcgtaaactaacgtggtcgcacaaatcgtcattaaaatcattgtgattgtcattatttttcaagcctctctttcatcaacgcgtgttttttcagtaagtggtgattgagtaattgttcaaataagaagcgcacacccacgaagaagataatcgatgcaatcacgatattgacgatttctgtcggagttgttgagtagacggaaatgcttaagccaccaatctgtaaagcagagaataaaatcgccgcaaagataatcccgattggatgcccattcgctaataacgcgaccgccattccattaaagccgatatctggtaaggcatttgaaacggaaatattttgataattccctagaccatcgacagcccccgctaacccagctagtagtccagataatagcattgcccacataatcgtttgtttcgtattcatccccgcgtaacgtgcagcttgttcgttcaatccaactgccttaatttcaaatccagtcttcgaccgtttcaaataccaccacatcacaatcaccaagactaacgcgatgaaaaagccccagtgaaacgttgagtgattggtaatctgttccaaaaaaggggtccgcaagcttgctttagggacaatgttggccgatgagtcgctgccttttggcgccaaccaacgtttaatcgcaaaattgacgaaatacaatgcgatgtagttcaacatgatggttgtgatcacttcactggtcccaaagtatgcccgtaaaaaaccggccaaccaagaccaaaagccaccgagcagcatccccgctaaaatcgcgccaagaatcaagagaatccccggtaaatttttaaagtggagtgcaaagacaatcgcgccaaaccagcccactaatagctgacccgacccaccaatattgaaaaagccggctttgctcgcaattgaaaagccaagggctgtcaaaattaacggagtcgcattgcgtaatgtctcgccaatcgaatagatatcgccgaatgcgccattaaagaggttactgtaattttgaataggcgaatatccaaaaaccaacatcacaactccgcccactaacagtcccgccacaacggataggattgcaatgattaatcctgaagattgttgtttattcattcgtctcgccctcccactggttgttgcccggccattaataatccgagcgtctgactcgttgtggtttgtggatcaacttcaccaacaatttgaccggcgtgcattacaagtactcggtcagctaactttaaaatttcatctaattcaaaactaacaagtaaaatcccacagccttggttccgttgttcaatcaagctctgatgaatgtattcaatcgcacctacatcaacaccgcgggtcggattggcagcaatcaagacttttggttgtttggcgatttcgcgcgcaaccaccactttttgctgattaccacctgaaagttctccggcaagcgtttgttcagattgcgtccgaatgtcgaatcgtttaatcagtttctgcgccgtttgattgatcacccgataattaagccagcctagatgactatacggttgatggtaataatccttcagcgctaaattttcagcaatcgacagtggcaaaatcaaaccgatattctggcgatcttctggaatgcaccctaagccttgttcactaatttggcgtggtgtccgtttcaataatgactgacctcctaattcaatttttccagactgcggttttaattgtccggttaaaacctgaattaactcactctgcccgttgccatcaatcccagcaattccaacaatttctcccgcatgcacggtcaatcccagatcatctagaacagtgcgtttagcaacacgagcagcgacatgttccaccgatagcatcacagcgccttgattagccattttcggtgtgggggcttgttgcggacggccaaccatcatttccgctaattttgtcggatccgtttgtgcgactagtaccgtatcaatcacacgtccggcacgaatcacgacgcaccgatcagcaacttgtttaatttcctttagtttatgcgtgataaaaatcaacgacttcccttccgcctttaacttctcaaaaatggcaagcaaggcttgaatttcattcggtgtcaaagctgcagtcggttcatcaaaaatcaatgtcgttgcttctcggtaaagcgccttgataatctcaacccgctgttgcatcccgaccgaaatatcagcgatttttcgatcaaggtcgagcgccagttggtatttatcgactaaagccgtgaccttttgccgcgccgttgcatagtcaatccggccctgtttagttggttcgtcacccaggataatgttttctaagaccgtaaaagccggaattaacatgaaatgttggtgtaccatcccaatcccgagggcttttgcatgtcgagggccatttaaggtcactgcttgtccgttcaccagtaattgccccgcagtcggctttaattgtccggtcaaaacacccatcagggttgatttccccgcaccattttcaccaagcaaggcaaggatttcaccctgttgcaaggttaatgaaatatcatcattggcggtaaaggcgccgaaccgttttgtaatgtgctgcatttctatcacagtttttgccatttttacgctccattcattaagcatacaaaaaggatggctgataactgctgccatcctttagcattcaatagtcgttattctgcagcaactttaatggtgcctgattcaattttttgttgatattctttgactgcttgccatgtttcaggggaagcattgtcgttcactaaggcaacgcctttgtctttcaaatcatatgtgacggttttgccaccagggaatttatcattcttagcttggttagcaagatcttccactgctgtgccaacttgtttaacggcagatgctaatgtgacgttgccaccatcatatttcccatcggctttttgatcttgatcaacaccaatcacccagactttttgaccacccttagaaatgttcttagcagcggtaaagacgccagcgccagtgccaccagcagcgtgataaataacatccgcgccgttgttgtacatcgcggttgccaatgattggccgacatcggctttcgtaaatgaaccagcatatttcacatcaacggtgattgctgggttaacggctttcaccccttgtttaaaaccagcttcgaatgttttcacgacggcactatcaattccaccgacaaagccgactttattcgtcttagtggttttcgcagcggcaaccccggctaggaatgatgattgttctgttttaaaattgacggacgcgacgtttttccgattcttaacgtttgaatcgatgattgcaaagttaacatttggattattctttgcagattggctgaccgcgttatctaacttatagccaatcgcaaaaattgtttggtattttgccttgattaacttattaatgttcgggaaaaagtccgcatcagaactcgattgtgcgtaattgtaaccattgaccccttttttaagatcatgactagcaccccatttttccaaaccttcccaggcagattggttaaaagatttatcatcaatcccaccaccatcagtgactaaagcggctgtgtgcgttgctttctttgatgctgtcttttgactcccgcacccggctaacacgccacctaatacaaggactgtcgagaaaagtacgaccaaactttttttcatgaaataagcctccgtcaataaatttgataatttattataaacacgttatcgacataaaatcaatacattgatttcattttataaaatattgttcgtttatattgtatttgttgctaagaaatatagataatgctaatattaattgataactaacgaacaatcaggaggcgaaccatgcaaacacaagtctattttaatcacgatggcggtgttgatgatttgatttcattaactctgctcctacaaatgccgacaatcaaactacttggcgtcggcgtaattggcgctgattcatatgtcgaaccagccgttagcgcgagtcgtaaaatcattgatacgttttcagatcaatcagcgcggttagctgtggccgcttctgactcacgcgcagtccatccttttccaaaagaatggcgaactgacgcttactcagtcgatgcacttcccgtgctcaatgaacgtggcaccgttcaaacgcctctgagtcctgaagccgcacatctcgatctaatcactaaactcaatcaagcaaccgaacccgtcacattgctctttaccggcccattaactgacttggcacgcgcactcgccatcaatccaagcatcgaatataaaatcgctaaacttctttggatgggcggttcttttcttgaacaaggcaacgttgctgaacccgattctgatggtactgctgaatggaatgccttctgggatcccgaagcagtgaaaactgtcttcgatacacaaatccctattgaattagtcgggctcgaaagtacgaataatgttcccttaacgccggcgattcgccaacgttgggctagtaaacgtgccaatgccatgatggactttatcggcacctgttacgcctttgttcctcaactggtccatttcaaaactaattcaacttattatttatgggacgttttaacaacttgttaccttcttgatccaacaatcgttaaaacaaaagccattgtatgtgatgtcattccaaacggaattgccggcgggcgcacgttcttaactaaaaacggacgtccggctaaactcgtctacgacgttgatgcagctggattttttgatctaattgaaaccatcataaaagcagactaacgcaaaaaggagcaccgacttatcagtcagtgctccttttttgaacgtgctttcatcaacagcttcctgtgctttgctacacttagcaaagcggtgcttgcagcgccaattcgctaagttaggcaaatgctcagaagctacccgttgatgacgcactccttttttgaacgtgcttgctaaactaggggaacaactttgtaaaggggctgtttgaatgacgactgatttcaatcaagaacaagcgcatctatccactgtttatcaacaattaaccaccactttgacggccatcaatgatgcccaatcgcaaaaccagaaaaacggcaacaccatcaaagcgcagatcaccggtgaagccaaactcaatttcgattcatacgctgataatcttgatacattcgctgctttagaaagtatcaacaaggaaatcgatatgctcaacctgaaaaccgattcgctcgttgcacgtcatgatgagaccttacggctgttagagcaaccctactttgcaaaaatcacgctgacttttcctgaggaaatagacgccgaagatttttaccttggttcagctagcttcacaaaccaagccggcgatcctgtgatttacgattggcgttcacctatcgccgatgtttattaccagcaaacattcggccccaccagttatcaagctaacggtcgcgccattgcggtcaatctcgaccgacggcgccagttccaaattcaagctgatcagctaatcgatttctttgatacgcagattgccatcgaagatcccttgttattagccactttaaaagaagccaaaacaacgcaaatgagcgccattaccacgacgattcaaaaggaacaaaacgcgattattcggcaacaaacgactgaccatttactcatcgatgggattgcgggcagtggtaaaacatcggtcatttttcaacgcatcgcctatttcaagactatatcgcccaagttttaccagacttaggtgaacaaacaccagtcaacttaaccctacaacaactattggcgcaattgttaccttctgatctagccgcactccccatcgctgatcaaccagctactttgaccatcacacaattaacgttgcaggcgagcgatttccaatctttaagccctggtttaccgctgacgattgatgccgcaacaagctactaattcttcttaaaaacaccggtggataccccgcttgataaacgaatacaagcaactcagcaacaactcacaagttgtctacaggaaagcatcacaaatgaagcccaatcagcagatgctttaactcgacttgaaagcctcactgaaaccgagcaacagcgcttattcgaccgcttaattcgcgaagatgaaccactagcaccgctagcacgcaaaatgattcgtcatgattaccaagacttagctgatcagctaagcggttatcaatggcttgcttttgatcaaataattgcccgtcaaacaccgattgatgctgttattgcagctcagatttatgcttatttaacgcatcacgtcttcccaaacgttaagcaggtctttatcgatgaagtgcaggactatcacgcaagcacgttatctctttttaaacaacttttccccaaagcacagttcacggttttcggtgatcagcatcaaagtatcaccccgcataaagtacaattcgaacaattacccaccatttttccacaactacaaactgcggcactgcgcacaagttaccgctcatccggtgcaatcacgacgttatttagtcaactattcaccgatttaacagatgtccatgccgttcaaccagcaggcaagcggccaacgacgatttgtgcgactgattttaacgactacctcacccaaatccaagctcagattgaccaactaccaactgaccagaccttagccatcatcacgcctgctggtgactttgacgagcggttaactggcctcaaaaatgtccaccacttatccacagaaacgacgaatctccccgaaaccggcgccttcactttaccgctgacgctggctaaagggttagaatttgataatgttttgttgtacgatctaaccaacgactattataccgagccaactgtcggccacaaccgcctctataccaccatttcgcgggcaacgcatcaattgacgctcagcgcactgggcaagttgccggttgaattaaatggccaataaattggtcatttgactgactaggctagtcctcaaaatataaacgctcgctgtcgcactctattcaaatacaaactgattgttgtacagttcggcgtagaagcctttttcgtctagtaattcttggtgactgccttcttcgatgatgcgaccgtctttgaggacgataatgcgatccgcattgagaatcgtctttaaacgatgggcaatcacgaaactggttcggccttggatgacgttgtccatcgctttttggatatgactttcagtcacggtatcgacgttacttgtcgcttcatccaaaatcaagagcgctggaccggtgataatcgtccgagcgatactgatcaattgtttctgaccggtactgaagatgttatcttcttcactgacagccgtttgataaccatcatctaacgtcatgatgaagtcatgaatgtgggcttgctgggcagctgccaccacttcttcatctgttgcatcgggtttcccgaagacaatgttgtcgcgaatcgttcctgagaaaagcacggattcttgcaacacgatgccgacgtgcgagcgtaatgcatccaaatccatttcacggatatcaatgtcatcaatcttgactgcgccttgatcaacatcatagaaccgattcatcaagttcatgacggttgtcttcccagaaccagttggaccaaccaacgcaatcatttggcccttatccacttcgatattcacatcatgcaaaatttgcttacctggtaaatagctaaagtcgacatgttccatggtcacggagcgttcaatgccctcaaattgcacaccgtcggttggacgcacttcatcgtcttcatcaaacacttcattcactcggcgggcaccggtaattgccaattgaatcatgctgtaactcgatgaaagttgtgcgatctggttatagaattgttgtgaatattgaacgaatgttacaactaagcccaaagcgatcgactttttaatgtcaccgttcaccgctaaccagctaccataggaaatcacaattgcggtattcaccaacgacatcccttgcatcaacggaaagatcatcccagaataaatctgaccttttaaagtcgccttgcggacattttcattatgttcaatgaagccatcaatcgtttcttcttgaaggctgttagtaataatcactttttggcccgtgattttttcgttaatgtagccattgagtttcccgacttcatcttgttgcacattaacgtatttttgcgctttattaatgatgatccaagcaaggatgaatgaaattgggacggaagcaattgtcacccaagcgagctgcacatcttttctaaacatcataatcaataaaccaattaagagcgccgtgcctgatacaagttggctcaacacttgattcatcgcattgtaaatattatctaagtcactcgtaaagcggctgagaatatcgccatctgaatgacggtcgaaatatttaatctgcattttttggagcttattgaataacccagtccgcatccggttggttgataacgcgttgacgcgtgagaaaaccgcgcctgataccaacgtcgctgctgaactaaagacgtagaataaaatcaacgatacaatcacctctacgaaggcgtctttagatgccccactggttggcaaatgttgggcttttaaaatttgaaatttcgttgcatatttgactaactcattgagcgcgtccccgatatattcgggtgctttcacctgaagataagtcgcaatcacagtcatcacgaggatgattgcaaaagaaggtttataccgctttagataatggaaaaagaacttcattgctcggttaaattctcgcattggttatcctcgctttcctttttgcgtttcaaagatttctcgatagacatcactggtttcaagtaattcatgatggttaccaacaccgactaaacgaccttcatctaacactaaaatccgatccgcgttgaccacagatgaaatcttttgcgcgataattagtgttgttgtgccagctaattcacggtctaacgcctctttaactaatttttcagaccgggcatctaaggcactagtactatcatccaaaatcagaatcttcggttgcccgattaccccccgtgaaattgagagccgttgtttttgaccaccagagaagttcgcactgcgttcttcgacggttgcatcatattgatcagcaagcttttcgatgaactctttggcttgggcaatccccgttgcgcggtccatatcggcgtcatccgcatcttttttcccgtgcttcaagttttgtgcgattgtgccggagaataaaatcgctttttggaggacaaatgaaacggcgctgtgtaaattatgttcgtttaaatctttgattggcacgccgccaattttaatctgcccttcagtcggatcgaacaagcgcggaatcaattgcgccatcgttgacttaccggccccagttgcgccgacaatcccaatcatttcaccagcgttaattttgaaattaatatctgttaacgtgttacgatcgtcttctggataacggaagctgacgtgatcgaattccaacgtccccgctaagtcttgatcagggacatctggataaacgatatcaggctctgttgaaagaatttcttggagtcgcttcaacgaaactgccccacgagatgccatcatcatcatcatgccgcccatgatgatcgacatcatgatttgcattaagtaattcataaatgaggcaatcgccgcaatcgcttctggatccgtatcgactaagttcccaacgaaatagattgatgcgacaaccgctaagttcgccaccaacatgaacgctggaatcatcacagaaaaaagcatcccgacgattgtcgtatggtgttctaattgattgcttgtttttgagaagcgactgatttcgttatcttcttggacaaaagacttcacaatccgcgtgcccattaaattttctttagcgaggttattaatcttatcgattaaattttggatggcaccgaagtgtttccccatcgaacccattgataagaatgtaatgatgaagaccgcgatcactaagagcacgataatccaccataaactcggaatcgaattcatcgcaaggatgaaactgccgacaaataaaatcgggattctaaaaatcgtttggagcgtcatcataatgacgttttgaacctgggtcatatcattggtcaaacgcacggataaattcccaactgagaatttttcaatattggcaaatgagaaagtctgtatcttccggaaagtagtttcccgcatatcggcagtcattccctgcgccgtcatcgccgacgtaatggtgttgaccacgcccgcaattaaaccaaccacggcaattacaatcaaataaattccaatttgacgtaccttatcttgatcgcctttcataatcccttccaaaacatcttgtaatagttttggttgccatagtgaagacgcaacagaaataaccgtcgctaaaatggaaaaactaaacacgccccaataaggctttaagtgctgtttaagtatcgacatgagcatccctctttttctgtagttgaatctcctgtacaaatcctgtacagtataatcgaacagtgttcgagttactactttatcaaattttaaaacgaattacaatcatcttttcataaaaagtgaaggagcttcattaatatggtaaaacagtcaatctctgccgagcaaatcatcactgccgcgtttgaaattttacaagcatccgggaccgtcgatgccctttcaattcgtaaaattgccaatcaattagacatcggggcggccacattttactggcatttcgaaaacaaacaagccctcctacaggcgatggctgataacattattcaacaaattgagattgagccatgtaacacaaccttagaatggacagaccaaattcgccaaatttttagcgccatttacaccacttacatagcacagccctatgccgctgagttgatgatgcggaccgtccctgcaactaaggcccgcctaggtcttatcaaccacttaattcaaatccttttggatgccggtttcacgccagaacaagcaagcctagcgattgaatccatcgatcacttcatgtccggtctcttcactgacatcaccggtgagcttgagatgaaacatcgcgtctcacaacataaagacacttatcttgcacagttaccgcttaaaatacagcagattgcgactgacaatcattacaatgctttcttaaaaacttttgaacatcatcggcaccaacaacaacgctcactggaaaaattcatgctaggcctcgatattttcctcgctggtttgcaacaacaacttgcttaaataaaaagcgcgcagacaactgattgtctgcgcgctttttacatttaaactgcttttgaacgaatcccgaatccataactcagagccatcacgccgacaatcatgatcatgtataacggtaatcgagtattcgatcccgtatgcaatagactcatgccgtacgttaaggcgctgattgcgaggtagtagccaaaactaaacaacccgctggccgtgccgatcacatcttcgtaacccactaatgctaaattcaagaccaccggtaaggtcgtattcaatccccacaagaaaagaggccgtgggacgacctcttcttttgtgggtttctagctttaacgcgctttttgaaactgacttctgtgcttagctccaatccgtaaacaatcgactacgtcgctcatttacagatttaggctagtgctcgaagtcaaaccgtttcaaacgcgcttctatttctttaacgtgcttttaattcgcaaccttctgcgccttgctacatcaaccagacaatcgcccttggcgcttatccttctgattaggcaagtgctcaaaggctaaccgcgaattaacgcactcatttttttaccagcttgcttttttgacgcctgggatttggcctttatgggctaattcgcgaaagttgatgcggctcataccaaattgccgcatgaaacttcttggtcgaccatcgattacatcgcggttccgcaatcgcactgggctagaatccttgggtaattgagaaagggctaagtaatcgccctttgcttttaattctgcgcgcaagtcagcgtatttcgctactaatgcgcgttgttttgctaattttgccacttttgatttttttgccattgataaaactcctttttaccctgctttcaaaagcatcctgttccggttagctacattagccaaacaatcggttacgccgctaatttggctaattaggctaatcctcacaggataaccacttttgacgcactcattttctttaacgtgcttttaattcgcagacttctgcgcttagcaccgtgaatcaaatcatcgacttcgtcgctaattcgcttccccgtactaatactcaaaagttgattaagcttgaacgcacttttccccgattgaaatagcctacgctaactatttatgaaatgcaattaaaaagacttataaaaagtaaccatttttcaacactggcctgtgctatacttaatctaagttgatttcacagaaaggggcactttcagatggcccaaaaaaacattctccaatacttaattctcgggctgttaaatcagtctcccaaaaccggttatgatttaaaacgcgtctttgaagatgatatcggtgagttctggcaagcccaacacagccaaatctatcctgaactcaagcgactcgaacaggctgatcggatcacccacgtcgaattgatcgccggaacaaaattaaaaaagaagcagtattcaatcactgcagatgggattgccttttttgacgagtggcgatactccccaaccagcgaaattattgccagcaaagacgaatttattttgaagctatactttatcgactcaaaaaataatgctcatttagacgcaatgttcaccgaacaaaaaaacttacaccaagccaaactagatcacctactcgaccggcgtcaaacccttttcagccaacaagctgcggtggatgcgcactatggtcattatcttattttagaacacgcgattaaccgcgaacaagactatcttaattggttaacaaccgcacggccgtaaaatcgacccttaacaaatttgagataagtgctatcctattagtaagaagtaaatcaagttaggctgtttcttcatttgtatacgttataataacgcgcttgtacaggtggtcagttgaccaattgtatgggcactttttttgtttgatccagcaacctagactttaacaaattcaggaggaatattattttaaagcgcaagaatgttgataaagtcgtcttcatccccacgatgttactgttcgggattgtctccgcatttttaatgttggggggtgacacgcttcagcagtcgatttcacaactacttgatgtgatgacggcacattctaaatggctttacattggtatttatatcattaattttattttcctattttggttggggtgtagtcactatggccatatccgcctcggccaaccaaatgaaaagccagaatataacgacttccaatgggggagtatggtttttgcaactgggattgacgctagcatcttaatgcttagtaccactgatccactgcaatacttacagaacccaccatttggcgctaaacctttctcggctgaagcataccgctacgccaacgtctgtgggcaatttcactggggacccatggcatggatgatttttgccaccgcgactgtcgcaattggctacgctctctatgttaagaacttacgggtacaacgtttaagcgccgcaatcgacctattagaaggaccacaaccttacaaaaaaataattcgcaaattaatcgactttaccgttgttttcggcattatggggggcatcggctcatcaatcggaatggaaattcccgtgatttcaaaagtcttgagcacaatgaccggtttgaatgataccatctggcttaaacttgccctcttcattatcttactggtgctattcaccctcacggtatatgccggcttagataaaggcattaagaagctcagtgcttggcatatctatactgccattggctttttattactcgtcttactaatcggtccgacattcaagctaattggcgctgaaggccgcgatgtcttccatctctttggtaacttcgggcgtttaagtttaaatcagactggtgcacacagtgcgttcgcacaacacgaaaccctcttttactggggatggtggttatcttacatgcctgtcatgggcttattcatcgctcggatttcacgcggccgaaccattcgccaagttttattgggaatggcgacatacggcgcatttagttgtatgagcttttacgctgtacttggcggttatgcgctcttcttacaacgttccggtcaaatcgatcttgttcatctattgaatacccaaggacaagccgctgtcatcgcggcggtcatcacgaccttaccgttcaaaattatcatgttagcaattttctgtctgtcatgtttcattttcctggcgacaacgatctcttcttcggccttcatcgtctcatcatttaccagtcttgaattgaaaatcggagaacaacctaatcgttggaatcggatggcttgggtgatcattttcattctattttcacttggaattgtacttgtcggtagtttccaaaccattcaagccgtttccgtgattgctgggttcccattgatttttgtctgcgcattattgctcgtttcgatttttcacgccgttcatgatggcgagattcccattgaaattgaaaaagaagaaacttctcattttctgaaaaaaaagcttaagccgaaattttttatgtgatacggtagattgtaaaattaatccgaacgctgttcggacaaaaaagatcagcttcctttaaaatggtgtttaccacaaacccatcttttaggagctgatcttttgtctagtataacctattccgaacgaattaaaatcgaaaccttttgtgaactagggctgtccaatatccaaatgggcgttcggctgaaccgatcaccgtcaacaatttcttatgaattatctcgatgtcaaccttatcaggctgaattagcacaaacagatgccgaatacaagcgatcacgatgtggtcggaaaactaagctgagcgatgagttaaagcaaaaaattctcaaccatttacgtctaagctggtcaccaggaatgattgctcacgaatttaaactagctactaaatctatttataattgactaaatcaggggagaattggtttctccttgaatgatctacctgaacatggcgtacgccaacggcgtaacgttgaccaacgatccaaatataatcaatctttggggcgatcaattgaacagcgtcccatgatgattaatcaacgtaagcgcatcggcgattttgaactagatacagtcgttggtcctcgtgggcatagtaaggcagttttattaactttaatcgatcgcaaatcacggttcctttgggcataccggttaaaagatcggacgacagcgactgttaatgaagcactaactaagttcctaaccacttttaatggtccggtgcacagctttactgtggaccgtggcactgagtttagtgggctagtatcacttgaatcacaatatggtattaagacctattactgccatgcttatacgccagctgaacgtggtagtaatgaacgctttaatcggaatttacgttatttttatcctaaagggactcgttttgagcacattagtgctcaagatttaacgacgacgttactccaaattaaccagcgaccgcttaaaatactcgactggcaaacaccgtatcaggttatgctgacaaatttgtccaaaaattcggattaaatttgcaatctaccatacggttatatctgttaacttttcagaaagaaggaatttaaaatgccaaccaataaaaaagaaggtattatttttacaacattaatgtgtttctgcatggtacttggaatgagtatctataacttagttttacatgatagtctatcatggggtgctttgtctaccggtttaattccaggtttcatcgtcgcatttattctagatgtattcgttgtcggtacaattgctaaaaaaatcgcatttagcttaccattgaacaaagaaaataaattagtcatgattctcacaatttcatgtttaatgattctcggcacggtcacatgtatgtcacttttcggaattctcatcgaaggtggtattcctgaccacttaggtagtgtctatcgtcacacatggttgatgaatgttatcgtcgcattaccattacaactgatcatcgtgggacctttctcacgcgccattcttggtaaaatccaagcaaacgcaaccgcaactgaaacagctgaataaaaacaaaaaaaacgacgactagcttacgtagctagtcgtcgttttaattatgctaatattttttgaatagccgctaattcttcggccgtaaacgttaagttatctagtgcatgcacactgtcttgtaattgactcaagcgcgaagcaccaactaacacactggctacagtcggctgttgtaaattccacgcaagcgccatttcagccaatgattgcacacgttgttgcgcaattttgttcaattcttgaaccgtactgattgtttgatcaaccttttcaggtgataggaagggactatctggacgagctgcccgcgaatcagctggaatcccgtttaaataacgattggtcaataatccctgtgccaacggactaaacgtaattgcaccgataccttcatccgccaagacatccgttagtccatcttcaatccatcgatcgagcatgttataacgtggttgatgaataataaagggtgtcccgagcgctctgaaaaccttcgtaatcgctttggtttgttctgccgaataattcgaaatcccaatatatagcgcctttccttgttgcaccaataaatctagggcccgagctgtttcttcaatcggcgtatctggatctggtcggtgatgatagaaaatatcgacgtaatctgactgaagtcgttttagtgactgatcacagctagcgataatattcttcttagagccccactcactatagggaccgggccacatataatagccagccttcgatgaaataatcatttcatcacgatagcgacgcagattatcatgtaaaatccgcccaaagttttcctcggcgctgcccgctggtggcccctaattattcgccaaatcgaaatgagtgatgcccatatcgaacgcgccaaaaatcgtttccttttgagtcgccatcttatcggtttcaccaaagttatgccataaccctaatgaaatcgctggtaatttcaacccagaatgtccgacgcggttatattgcatcccttgataacgggtttctaatgcgtgatacatgtacaacgccttctctactcaagtattttgactatttagccgatcgtcttaattgcgtcttccactaatccccagaacttctgatgatcgagttttacagcgactgatgtgtgacagtctgttggaattgggaatctaaaatcggcgaccgtcatcccacgcgtcaatgttccattgagttcgatatcaacgggcactttcttagtggtcatcacacttggatcaatcacgtaagccacggcacatggatcatgaacgggcggtgcatcgaaattttgccccttcttgtacatatcgcggaaaaaggctaacaaatcaaccacgaactgagacgtttcagtatgaatgccttcaatttgttcaacaatatctggtgtcgctaacgcttgatgcgtcaaatccaaaccaaccattgtgacatcccagccggcattgaatacaatcttggccgcttctggatcaaatttaatgttaaattcggccactgcactcgcattcgcttcgtgataaccgccacccattagaacgacttctttaacgcgttcaacaatcttaggttctttgcgtaccgccattgcgatgttggtcaacgcacctgttggcactaatgtaattgtattagctggatgcgtcataattaaatcaatgattaaatcaactgcatgacttttttcaagcgccaccgttggttctggaagaacaaccccgtcaaggccagtctccccatggatatcagctgctactttaatttcttcaattaatggtcgcgaacacccagcagcaatcggtacatcgtgcatgccgatcatggtcgcaactgcgagggcattgcgcgtcactttcgttaacgtctgattggcagccaccgttgtcactgccaacaaatcgatttctggattgccgtatgctaacatcattgcaacagcatcatcatggcctggatcacaatcaagaattattttctttgccattcgtaaaacctccactctctttcacttcgtgcatactatcactatagaatttaagcggtttcaagtcaaccatatataataaaattcaatcatgaaacggagtctattatgcgcattgatactggcgaataccctaccggcgaaaacgccgtccaccctaagaaagttaaacgtttaaaattacttagcaaggttgcaacaatcacctgtattacgatgtatgtttcatacatcccccaaattatcgctaatttttcagggtcacctgtctcacctttacagcccttagtcgcaacaattaatgggtgtctatggaccgcctatggctggaataaaacctataaagattggccggttattatttctaacatccctggcgttattttcggactcgttaccgtaataactgtttatattcactagaattgtttgttaaagccacgatttgcgtcaaataatttttgataactaacagaaaagcaatccatcataagttgcttctctgttatttttttatccctttacccaaacataaaaagccaaggtgattccttcttttatcgaaagaaaaccatcttggcttcactttgaagtaccgactatgggactagtcggccttaagcttgttattttgctgctcgtttaacgtatgtgccttcttgtgtgttgatttcaaggacttcgtcagcgctgatgaaatcagggacactaacgactaaaccagtttccatcattgcaggtttacctgaaccagtcactgttgcgcctttaatcgaaggttgtgtttcaacgacccgtaagttaacagtagttggtaaagtaaccccgatcacttctgaaccgaagaattgaatcttgcagttcatgttttctaataagtattttaattcagcttcaatagcagctgtttgaatttcatattgttcgtaagtttcaagatccatgaagaatgccacgttatcttgtgtgtataagtattgaacatcttttgtatcaatcattgcttgttcaactttaacttctgggcgcattgttgtttcaacaattgagccagtccgtaagtcacgcaacttaacacgcataaccgtgtttcccttacccggtttatgatggttagcttctaaaactttgattaacttgccgtcttgttcaaacgtcattcctgctctgaggtttactgcttcaatcatgacttgatctcctttatttaaaaaaatattcatctctaactgtaccaaatgaaagccgtttaatccagccctcctgtggtagttatcctatttaatgtcgagtttatgaatcttatccgttggttgtggctcataatgttggtacatcttcgtaatggccaccttaggtaagcctgattcactaatataaatattaggtttgaggtatttcttattttgcacatcttttaagtgataatgttgaatcacttgtttctgatggccagtcggcgcttcatcttgaccatagaattgaatcttggctaatggtaagctaatcgttgcattattaatcttgaaataagcaacatctcgattgctgccaagatacgtcatcttttgttgcttatcagcttgatagaattgctcgatttgcttcatgctgtgattatcgaccagccggacaatcggttgatcacctttgaaaaggtgtaagccatctagcgactggcgcacgttttgagcactcaacatcaaccagacaatcaccaacatactgataaagtacacaatatgtaagctaagactgctagcagcatgattcaaactaaaagtgtagctatcctctagctctttattcatgatttggcgccgaatgcgcattgcaataatcttatacgataggtaccacactacaagcgcgactaaggttgccccaaaagctgtcaaaattgtattttttagaatttctgaatccgtcaataatggactaaagccgctcacaagtttaattgtgagcgcgccaaggattagaatcacaaccatttgtagtacaaaaaaacgggtccgaatacttttgctaatcttcgtgggtgttaccactttcgtcttatctcccataccataaatcctcccttgttaacctacttaccattttagcataccgtttccatcaagttgattaaaagtccctcgttggcttattttttacaaaggcatctttcttcaaagttagctgttcaatatgataagatgaagttaatcaaacggaggtgtcgatatgttatatccagaaagtttaactcaattactcgccgattcaaatcagccagtcatctcgttattcattaacttagagactggcggacaagccattaatgcgaacaagattaagctcaatagtttttctaagcaaatccgtgaacagttaaccaccgactatcctgaagaaaaaaccttactcaaccaacttgaggacttactaagtaccgctccccaagaattagcacatatacagtcagttgcgttttacatcacagctgctggtcactacagccaaccccttcattatccgatcacgactgaatattttctaattgctgatcaacccgacctgcgtccactcagttcggaattaagtctgagtctgaacgggaccattctctgtctcaacaagactacttttagtttgaaatccattcaacaaaatgtcattcgggattatcctttacctaaagacgccccaacaaccattgaaattgggattggcacagagcgtaaaggcgaagtcgtccaaggcttctcaagtccaacccacagttttgttgtaaaagaaaatgaacaacttatcgatcaaactaactatttccgcgtgattggccgctatcttgatgacttgctgcctgaaaaagcaccgatttacgtgatcacattacccggcaacttaaatctcttcaaggaactcgtcgttaatccaaactaccggatggatcaagccatccaaacttcccctgattctctttcagatgacgacttactcgacaagttactcacaaatgcgcgtcatgaactccgacaaaaagcgctcggattagcagaacgggccgctagtgcgtatcacgccgattcaaaccttggtgatcctgagattattctttcacgcattaacaatcgccaactaacagcactcattatcccaactgcacttgcaccatcagcaacaatcagcgccgatcaaatcatggatcttaatcacatgatgattgcggccatccaaaccggcctgccattctacccagtaccagttgaaaatattccgacaggactggtggcgatgggaatttaactcttaaaacacgtgccaatacagcaacgtatattcaagcgttgttgtactggtccgtgttttttgagttgcaaatacttgatctagataagctgccagttggtccgttggtaattcttcgtaataggcctccaaaaatggcctgtcgaaaacttcacttgtttgatattgaaaaatttgttgactaacttggtagcccgcatcttttaacacgttttccacagcttggatgatttccggtgtagtgttgggatcttgctgttcaatcccaaaataacgttcaagcggtgtgaacaagtcgtcctcgtttttagtgagccgtaagaatgcacaccactgacggctcttttcgctaatcgtcagtaatgcttgattggcttcgattgccggatttaacgccatccaaattaaatcatagcttttttgtggcgtttgcgccataaagtcagccacagactgctgttgataagcaatctgttggtctggtacatgctgtttagcttcttgttgtgcatactggagcatttgcgccgagatgtcgataatcgtataagcctgactgttttgcactagaggtggcaaataacggccgctaccaccacctaagtcagccactgtctcaacaggcagtaatcgccgatcctgtaaaaaagccacaacgtcagtgacaatcgacacctgtgactcttgttgaatctgatagtattccgctgcaaaatcatcccaaaaagctgcgacttcattatccacaatctatcctccgcttaaacttttattttctcagcttagcatataaaaaagatgccgacaaaataaattatcgacatctttttgaaacgtgctttttggttgcaccaacctccgcttaatctaaaatactcagttgctatccgcgaccgaacacacgcttttttaaacgtgctgcaatcgccatattcttccgttgttaggctaatcctcagaatatctccggcgattttcgcactctttatctcactaccagcactgggattggtgcgtattttgccatgtaggcggcttggctgccgaagtatttagcaacgcccttttgtgatttcgaaccgacaattaacaaatcgggtttaaccttaggaatcacatcttcgataatcgcttcgcctggttcgccttctgcaattactgttcgcacatgattcacaccgcgcacataggcttgatcttgatattctcgtaggtggttttcaagatcctcatattggccgtggataaaatccttgttcaatgcttgatagacgttcatttcgtcattttccaataccgatacaatgactaattctaaatcctcacgtttagcccgctcaattgcataatcaaacgctaataacgcatcctctgagtcatcgaccccgactaaaattcgtttaatttctaaaactgacatgtgaccaacctccaattaattttcagttgctaattgctgttcaaaccgcttattgcctttatacaattcaataatcatccaaaccaataatgccatcacaccagcaatcaacacatatgcaatgcgatcagcagtagccaattgtgcagcacttgcgtgatcaccatagaaagcttcgatttgtcctggcaaccccatcatattcaaataggtcaagccaatgaccgataaccaacctaagcttttaatcaaccaactattcttgaagcgatcccccatctcaacccggctgtcggtaaacatcaacagtggcagcattgaaaatggtaaggcaaacgctaagaaaacttgggaattattcatcaaggtattgagcgcctcatgctcttccaaggctggtttattgctggtcatcatgacgcagattaataccggaatcaccgataacaagcgggttaccaaacgccgcaaccacagtggcattctcaagtgaatgaacccttccatgatgacttggccagttaacgtcccggtaatcgttgaattttacccagaagcgagcaatgcaacggcaaacaaagttgataagattccggtccgggcaacacttgcaagaattccgttactcattgttgaggtatctgacaaagctttaaataacccgaagaatgatggatctttaaccgttcccgttttaaaaactgcaacccccatgattaataacaacgcattaacgaaaaatgccatcgtgagttgaatgtttgaatcccaagtggcaaagcgcactgtttgtgcaacctgtgcttcgttcttgcgatcaatcttccgtgtttgcgaaatcgcagagtgtaaatatagattatgtggcataacagttgccccgataatccctaacgcaccagtcaatggggttagtccaccaacagctggaccggtggcaaaggtcttagcagttggtactagcccaacaatcacccctgcccaatcaggatctgagagtgctacttcataagcaaaaaccacaaaaatcacgacaattaatgcgacaacgattgcttcaatcttacgaaaaccaattttcgttaagagtaataatagcatgacatctaaaatcgtaatgaatactgcaatcagcagtggaatcttaaataataagtacaaagcaattgccgccccaataacttcggcaatatcggttgccataatcgctaattctgtcaaaatccacaagacaatgcccaacggtttactcgtccgtgcgcgaattgcctgtgctaagtccatctgagttacaatgcctagtttagccgccatatattgtaataacatcgcgattaaactagacaccaaaatcacggacattaacaggtattgaaaactctgaccaccagtaatcgatgttgaccaattccctggatccatataacccactgccaccaatgcacccggtcctgaatacgctagtaacatcttccaaaagcctttgccctctggtacttcgaccgtcccattaatttcttcaagtgatgggccgttcgcatattcaatcagcttgtgcttcttgcccttttcttgttgattcattatcctcactccttattttgatcttgataacagttttattgtacgccgttttaatgaaatataaataaaaagttaggcaatgctaatttattttattcaaatcgataacaaatttattaatgcaagctacaaaaaaagcgccgtcgaaattattctcgacggcgctttacatactgctttaatcatccatttctttttcaagtagcgcgccagtttcagcgtctaatttaacttgcattttttgctgtttttgatgaccttctacttcccagactgttcggccatcatctttttccaatgaccatttgatcacgttcccggtgaagtattgttgcgctttttgaagagcttgttgaggcgtcaacaattggtcaaacgctaattgcttttggtgtcgctcgacgccattttgttcatcggcatcaagggcttctttcgacaatcgactggttgcgccagttcgagcatccacatgcatgtgaagctcttcattgtcgttcattcccgttaattcataaaacatttggttaccccattgcttcagctcaacctcggttaaatctgatgcaggatattgttttgcgtacaattcacgggctttttcaagcgtcactttcggagcttgaaccgtttgttgcggactagtcgattctttttgagcggggggtgctgaatgttttgtttggttggctgtacaacccgtcaataggccgagcgttactaaactaacaatgattgttgttttgcgcatcctgttctacctcgctttgttttgatacttaaggataccattcaacagggtaaattaaaaagcaatatcccttcctagagcaatgttgtccccactttgaccaataaaccaagcccatacacgatgatgatgatggcactcactaagttgacgcccatcaagaattttggtgaaacttttttccggaaaaggctaaagataatggcgataccaaagaaccaggtcgcggttgccgaaacaacccccacgatgaatggaatcgcctcgctactcgtcatgccaccccgcaatgcgcccagcattaatgtcccatcaatcaaggcttgcggattaccccaaaccgccacaaatgcagtcaaaataaccttctccagtggcattggttctaacgcgccaaacgtaacggtactgcgggcactttttaaaatggtgtatccaatccataaaatcaaaagtccaccgattcccataatggctaaccgaaccgcatcgttttgcacaatcagtgcgccaatcccataaaacgccacgagtgaaaagagcgcatcaaataaccagatgaacaaactgttgaaaactgcccgccgtgttgtattcgacatggcattattaaaaacgaaaatattttgcatcccgattggtgcgacaaacgcaaatcccatcaagattccttttaaaaagaacatctattaacctccttggcaagttacctttcagcgtaacatatctaggctaaactttcttgtctggatttaattgtaaaatcagcatcgtcatcgacaagaataatgctgataaaatcaacgtccgttctcctaagaatgagacacatagtccgaccatcactgcaccaatcgtaaaactgataataatgcgtaaaatttgccagcccttatcggctgccttacgatcatgtttaaaaacagcgtcataaaaactttccgccatcgtccgtacatttccagtcatcatcaatgatgtaaatgggccaccatccaattcacgaaattcctgtaattgcgcagccgcaatgattgaaacaagtgaacttgcaacaatatccggtacatacggtgaaattcccgcaacaatcgttaagaccaagacttcaatccccaagataatccgttgtcgtttgttaatcgattcgtctttttcaaaccgatgttgtaaaatgcgcgttaagattgttcccaacataaaggcgagaatcggggtaatgtgccgtaataatacggaccatttcatctgccccaaatgggttcctaataaaattagattccccgtttgtaatccggcgaagacttccccgtgcaccaaataagtgtaagaatcaaagccccccgcagctgccagtagcccgccatataataatttgtcgctcattgtcattttgttccgcattaattcatcctactcctcaactaaactataagtattaactctatcggaaaaaccgagagcgtaaaatatcttgtgtaaatgcataaaagatttctgaattgtatagaaatagggaatgccttcccttatgatatttagtaaccacagaaaacatcacaggaggcattccccatgaatgaacttaccacagaaattatcgctgcactagcccaaaagcaagatttggacgaagtttttcgtcaccacctcgaaattgcgattaaccagctgcttcaaaccgaattggcagagtttttgggttacgaacgctactcatacgctgggattaacactggtaataaccgcaacggcagttatgagcgctcgtttgatacgaagtacggccaacttaacttaaccattcctcgagatcgcaatggccggtttgaaaatcataccttgccagcctacggtcggcacagtgataatttagaaacaacggtcattcagttgtataccaagggaattactactgctgaaattgccgaactcattgagaaaatgtacggtgctcactactccaaagccacggtttccaacatgactaaagccgtcaatgaacaggttcaagctttccagcaacgtcgactggcttcacaatatgcggccatcttcttagatgccacttacttgccgttaaagcgggataccgttcaaaaagaagccgttcatattgcgattggcattcgtccagatggtacgaaagaagtgctgaactaccaagtggcgccagcggaatcgactggaatctggactgaactgctgggaaccttgatcaagcagggcgttaaagatgtgctgttgtttgtggccgatgggttagttggtttggatgaaggcttgaatcggcatttccctaaagccaaacgacaacgttgcctggttcatgttgggcggaatctgatgaacaaagttcgcgtaaaagaccgcaaggccgtgatcagtgactttaaacaagttcatcgggccgccaaccgtgaagtagccgaactgaaactgaatgagttcgccaacaactggcatcagacctatcccaaattaatcaaagatctgcttaaaatgccgaatttactcactttcatggactttccaccagctatccggcaatcactatactccactaacctgattgagaactttaataagcatctcaagcgcaccacccaccacaaagaacaatttccaacggaagattcactggatcgcttcctggtttctcagtttaatgtttataacgagaagtctctgaagcggatccaccgagggttcaaaggactccaggacaccttggaagcatcatttatttaagttagatacatattatatgtacgaaggcatttcatttacacaagattcttgacgctaccgaaaaaccactcgccgtctacaagtagttatcatttaaaacgttatcaaaaaaaggcctcagcaaactgattttgctaaggcctttttggcttaattttctacgtcaccattgaaaccggctaattgacttgaataaattgataaacgcgtcgcataactaggatggtcattattttccttgaccacttctttaagcgtcgataattgatcggtaataatgccgtcaacgcttgtaaataacatgcgttgcatcacatcctcatcattcaccgtccaagcatatactgtctgccctttgccgtgtgcttgacccacaaaatctgagtcgagcgtcgtcgcttccatcgtatagccattagccggcgtttgggggaatgtaatgttatacggcagaataaaactaacaaatagttggggtgctttttgtttaatttccgccacaatcagataacttaatgaatgaatccggttatgattcttcaaaagtcgtttttcgtatttatcgataaagtgttgcaccatctgtggactgtcttcattcgttgtcttaatttcaacgagtagtttttgatggtgcttttcggctgctgctagatattgatcaaaactagcaacctttgcagaatgaccattttcacggacagtcaatgccgttaattcagcaagtgtcatgtcatggacgccgcgatcgacacccgccaagtgttttaaattatcgtcatgcatcacgacaaattgttgatccttggtttcatgcacatccatttcaacataatctggctcttcctgcgccgttttttcaagtgctggaatcgtattttgcacaccattaccatcatctaccccgcgatgcgaaatcaaggccggttgatcgtccaacattccctctaaatagacataattgtacaatgctaccccaccagccacgataacaattaaaccgattgtgccaatttggcggagaatcgtcaaattagtccgttttttcaccttagattggcgcacaaccgtcgccattgcgggaacttcaccatattggttcaatacaatctgtaagactagtaccaccgttaatgcgagtaaaatctgactgacgatttctaaaataaacagattcaaaatggctaaaaataaagcctggtgtggcaagtgttggtcgtaataccgttgactagcaaacaagattaagcggaagcccactccaacaattgctaccgacgttgttaatacaaagccttttagaaaaatacgccaagcctgatattgggtagcttgccaacagcgtttgagcgtggttcttagctgcgcctttgaatgtgcaatcgtttctggtaaaaacgtgattaagcgaattgaaaggactaatgcactcgcgtagaccaagataatggggacccaaattttgggtgatgaccacatatcctgaataataaaatctggaacggtcaccttggataacaacgctgatttaaagaggacctgtccaaagggtaagattaataagaaatacagtaaaccaaccaacatcgtggttggccgtaaagcgactaatccccggactgtttccttaaaaatcatccagtatgtttcttgtgtttgcttttgaatatggcgcatactgcgcaacaagaacgtcatttgcagataaactgccgcgcaaatcaagaccagaatgattagtaagctaatcagtaaaagcggatgacgcatcatcaccggcaccagattggtgtaggttaaatacgtcacgccattgagtgccaccaaccgttctacaagccacgtaaacagcggtgccaccaagctgccaataattaaattcgtaatgacgagcagtaataaataaacactccaatgttgtctaaagagccgataattagcccttaaaaatgatgttaaacggcgcatataagttcctcccgaattgttacgttaaaattggtaataatgaaatcatcagataaatcatgctactaatgagaacaatcgcgacacttgtccaaaaattacggtgcttttgaaaatgatataaggccaataaactgccccaatcgagcagttcttgacttggaaccgcaagccacgataacgtgccaaatattaaaaaactgacaacgactgccgttaacaagcgcaagaaccaaccgaatacccgtagactttgtaagattgtattcacaagctgaccagtcgtaataatcaccatcatgtacaaactaatgaataatatctgacaacaaaagaaccatgctaatgtcggccagacctggttctgataaatcaaggctgcgtaatcatttattagaccgacttcaagtgatttaagcagtacctgatacattaaaagggctccaacgattggaatgccacaaaggagtacaattgcaccgatagccccacgaatattgtgccaactaggaagcccaaatgaaccttcttgtgccagccataaaccatcaaaacgcgtcaaccaccatcctagcgcaatgactaacaccaagtaataagcaaagcttagaagacgtaaccaccacggttgtgcggctaactgcgcaaagtctaggttaaataattgcaacagtggttgattcgtattcaaaagcgttaacacaaagatcaaactcgcaaggattaatccccatgtgcgcttactgagcttttgcatcatcattttgctttgcctcctttaccagagtatcaatatcaaacgatacaacccgaccaatccgcgttttagcatttaatgcataggctttggcaccagattcaaaaaccgcatataaccgattgccatccaacgtaatctgctctaaatgagctggcatccgaatcttaagtagcgccttttctggcgtaaattgttggggccgcccagtcgttgcaaaaacgtaaatccatgaatcgtctaacccgtaggactgcgaaaaataagcccgcgtatcactaaaagttagcccttgaatcttatccactgcttgccaacgttgttcacttttaagttcattactgcggatattccgcgccgtcaatttaacaccagctttttcgcgtcctttaatgaccgctgaaacctgaaacgactggacgttactatccccgaaaatattgaaatagccgactcataatgccccatcgtgatagctaacaagtgaagcccgggtgatcgacttcaacaacgttgaatattggtattgaatcggcttttgcggctgatctgcagggcactggcgaatagttgttaacttaattgcaaatagctgtgcacgtgccttcttacggccacaaacccataagagatcatgttcaggatcataagtaattccaccaacgtgtggtcggccctttaaaataatattcttcaaatgtcggccagtccgcttatccataatggacagaattgagttgccttgccgttgatggtcataagccgaaacgatcacatagtccggcgtaactgttcccccttgaggtgtcatcatttctgctgtatatgctttgtaacctgccggcgtttttttcaacatctgcgcctggtctaaatctggcaccaagtaagttccagattgggttgcctttgcatactgtccaaaagaagccggcgttaacccttgatagtaacccaaatcccgttttagatgagggagtgtaaatcgcgcataaattacctgtctagattgcgtgattgcctgttcagtaaccgtcttagcaggaccgaaaataagccacaaagcagctgataacaaaagcaagcagccagttaataaaaaggttgttcgtttttccaaatgcatcatcttactccttatccgcaacaaaattagatacttgttgattccctcagtataccaaactctgaatttaatgtacccctttaacgaatgaacgaacaaaattattagatgcacacaaaaaaagcataaccaactaagtggttatgccttttttgtgatggctaatactttaactttccatttatctctagaatttcatcaatatggtttgcgtaccaatcttcatatgcctgaccgacaagtgctaatacctctctccctttgtcggtaaccgccaatgatacccgtcgctaatcatctggtgtcccaaattctttggttatcaaacctttccgataaagagtgttgatcttgcgtgacgttttaggagcgccaccaccaatttccttagcgagttgtcctggcgtaatcgcttgcttttcttcgattaactttaagattaaatggctgtcaaaactaacaccatattcttcaccaatttgattgagtttaaattgaatcgttttgattgcattgacccaatcaacaaatctgttaaatctttctttgctttatcttcagtcattttatattctcctactaaactctgttgccatcatttgtaaaaccaacatttactaataataaattagcttataattaagcaatattataattattattatctagttcatcgcgctattatcttttgtgcaagtcattatagtcttaatttcataaaaagtaaatattttttaaaaacttctacgacaatcaagattttcggcagtgattcatttacaatttaccaaaatccacatcaataaatacctttttatgactagagttactcagatgaccttctagatttgatttatattttgtttataaaattggttttatttcataaaaaaaggcccgcatctaggatgcgggccttcaatcattaatgtctagttatggatataagtaaatgccccggcatttgaaattgtttgggtgttaggaccagcagggttgctgaagcccatcccaccttgagtgatggtaattgtcccagctgcggcatcgtatgattgaacgtaagcaacgtgaccatatgtcccatctgcggcccaagaacctaccatttggccaccagcaaagctaacgattgcgcctactgctggtatatggttaactgtgaagccagctgctgcggctgaagcaccccattgagcgccattcccccagttattgccagcccaaggtgctactgacttaacataccatgtacattgaccccatgcatatgaattcccagctgaattaccagcaacttttccgctgccaccgaaaacagatgtgccacccttattatctgatggcgtgtcaattgatgtaggttgaggtgtgtcttttttagcattgttggcatcgtctgcagcctttttagcagcagcgtctgcttcttcagtacttgctttgtcgaagtctgcttgtaaagctgttaattcgtctttgttatcattgattttttgtgataaagctgtttgtttttgatcagcttcactcttcaatgattctaagtttgctttttgtttttctaaatcagtcttagtagcaactaaacttgctttagtattttcttgttctgtcttcaagccgcttaattttgccttagcgctgttaacatcatctaaagcttctttacttgcttggtttaatttattaattgtgaatgaacgcgaaactaaatctgaaaggtcatttgagtttaaaaggaagtcaacatatacgttcccgctgacagcatccccactcttttcttgtaaggtcactaattgtttcttcaatacgactgttcgtttagaaacttctttttgagcatccgtaatttgacctgaaagagattcgatttgattatttgctttagtaattgctgcttcttgatcagcaatttttgaagcgtttgttgaaatcttttgatccaacccaatcacttctgtattagctgattcgatttgtttgagcaaatcgtttgttgcgttcttattagcagtaatcgcttcttgtgcttcacttgaagttgcagcagatactacgtttgttgaaagaactgaagctgttaataatccaagagcaattgtagtcgtaatcgtttttttaaatgacatggtttattttctcctattagttaagcccgaactctgagactaagtatatagagcgaatgttacattaacattacataaacattatgcttacttaacaaatcataaaatataggctttgtaagcgccttttacgactttagaagccgatttcagagaaccctttcttattatttccttatcatatttaaaaagatgacgccgaattcattcagcgtcatctttttattagtcatttataaaagtcacttcttcatgctgcgtccaactatccaagcgcgcacttttcagttcaattgcgtagataatttcccgttcacgatcttctgctgataaactatccataaacccagggacttgggcgttgtaataatcagctaattcatctaacttgtactgcgcgcgataaacacgcaaccggctgctagcaatcgtcattccttcgctagttggcattgtgtgaattgccgctaaaccacgatcgagttcttcaatcttaggggtatccggtgctgtcccaaaataccaaatattcggtgcatcatccaacacgataaaccgcatttggcggcttgaaggttgcccattttcatccgaagtactgagcatcatttcatttgtttgattaacgaacttctgaaatttgcgcaaatcattttgatgaatatgcggattagcgttttgtttatcaatatacgcgattacttcatcgatcgatgtaaactgtggttttgtatgtaaaaaatacaaaatctgtggaatcattcgcgaaatttcccgcttgtgataataaaattgtaaccaccgcttagacgccaacaatgcccctgcatactggacacgcaggcggttattatagtgtttgataaacaattgcattggattatagcgcaccaatttctgccaaatataaaaattgaagaatagtaaaatcacggtcatcaaaacattcacttgaataatattgatgacggataaattaccgtatcgtgcaaaagaagtgtacccaaaaaccagccgttgttaaaatagcagcgtacatcactaaacgttgcttaaacaaccgtcgcttatgcataataaccccaatcacgcgttggcggtttttcatatttcgctcacgaacaatcatgtcatcgacaattgcttgatcttttttagaaagcatcttcttcctcctcaaaataatcaaatctttgccgtaattcataggtgcccacatccgcgtaatctggaatgataatctgtggttgttcgtgccgcatgtctaatggaccatacttttgtaagtacatatcctctgctagatcgatgcgctgtctcaatcgcgtcggatcatacatccgcagcaaaccttttttcaaacgatattttcgtaatttattcaatagaaaaagccctaaaaagaagactgcaaatacggcaacgtataataaaaagtaataattagtctgtaataatatccttctaaaggccattaagtcaactggtagcggaacacttttgacagtatataagacccccgtaatggtcatcggtaccagacacattaaccatccaatggcaatcagaatcccctgccagatttttttgcccgtctttttcttagtaaaaaaccaatcattcgtcaacgatgcttcactcacttgatgcgtgatatagtctggtttagtcatcttgattgccctcctcttttgtcttagcgacgacctctaccgaacgttttggtgacttccaaacgccagcatcctcgcctttaagaatctgaataatcgttggtccgatttcaaccgccacggtgaaagtattcaccatccaatagattaggatacaccatggcgcaaacgcaatatactttaatgatcgtccacggtcattaaagtaagacgccataatcaactgaattaagcccaccacaatctcaattgaaataaaaatcgctgcaaagcagaaattggtaattagacgtgaccaatccccttggaccaagcacaacacctgaacaccaacaaacgcaatcatacttaaccagaaaaatagcgaccaaataacacttaaactgtaatcaacaataatgggtaccattgccaaatgtttaatcgggtgtctaaagacatccatcgatttcgttaacaacacatgaatcccaccggcagtccaccgtctccgttgtttgaccaactcaggcagtgtttcaggcacatccataaaaaagcgaatatgtggtgcgaaatacgcttgccaaccatgcacctgcatatcccaagaaatagcgatatcctcagttggttgttccgcttgccaacccccaacatctaagaccgccgccttacgatacatggtattagcaccagaaaatgcaaatagaccaccgtatgaaagctgcgaacgtttaatcagtccgatgatcgagttcaattcattttgttgtgcttcagctaccaacgatgttttgttgattaataacatattgccagtaatggcccctaatcgatcgccaccttctcgttcgaaatagtgcatgtatttccacaatgcatccacttccggcttagaatcggcatcattcgataataaaaattggccttttgaaaatccgagtgcaatattaaacccagcggctttcccacgattattaatgatcgtaatcacacgtaagcgcttctcaccataccgagtctgcaaccgattcaaaatagcacctgtttgatcggttgaaccatcgttgaccacaatcacttcatactgattggttggataattcattcactcttcaaggtgttcaattgtcgattcaatcgaagcttcttcattatgcgcaggcactaaaatagtaatgaatggcgtccctttttctaagtaacgtggcatatctttgcgttctaaaaataaccagtaataaagactggaaacaatgaaagataatcccccgacgattggatacgacacaattgtgtagatgagtatccttgttatgtaatctgaaaaagccatgtagtcttcacccagtccttattgttgttcgattttaatagacgccaacttcatcacggacaatcaattgctctgcaaccaatacaataacacatcaggttcacattattaaatatatttatttgaaattttatcaattttaaaatgaaagcgtatattccacatcgagaattaattatattcttatttttggcgtacttaacgaatcgaagctttattttttgttgtaaatgcaacaaaaatattttatactatttttatcgaaatgaggtatgccatcatgactgaaattctccgcccaatcggggttatagcccgcgcgttggaatccattgctaatattgaattccaacaatatgatttaacccgcgggcaatacctttacttagtccgcattacagaacagcctgggatcattcaagaacgtctaggtgaattattaaaagtcgaccgcgcaacagtcacgcgcgccgttcaacaattaattaagcatggtttagttgaacgacaccctgacaaaaccaatcataagatcaaacatctctatctcaccgaggccggtcgagccgtctatcccgccatcaaagctgaaaacgattattcaaatcaaatggcactgactggactgacgaccgacgaggcccataatcttgaagcactcctaaacaaagttagtgccaacgttgccgcaaactgggattttgtcaaaaagggacacgtccgacactattacaacaaaggaggcatcacaatgccaattcaagctgtcacattaaaccaactacctgacttacaatccatcagccgtgaaactttcacagcaacttttggcgctgaaaatgcagcagaagatctcgctaactacttagaagaagcttataatacagaccgattaactagcgagctcgagaatcccgattcgttcttctattttatttatcaagatggcgaagtcgctggttatttaaagctcaacattgatggcgcacaaactgaaaaagctgccccggattcactggagattgaacgtatctatattcgacagtcctttaagcgacttggtttgggaacacaactaattaaccatgcactagccgtggcgcaacaattccataaaactaacgtatggctcggcgtgtgggaacacaacactgctgcacttaacttttacaaaaacctcggcttcagccaagttggtgatcacatcttccaactcggaagcgacgcacaacgtgatctgattatgcaaaaaacattaaccgtttaaacacacaaaaagaggcaacctatcaggttgcctcttttttcgattattgatgcgcacgttcatattctgtatcacagtcagctgtaaaaatggattctgttccggcttcaagtgcctttgtgtaataccattctttatgatctagcttcgtcaattctacttgcagtgattcaatctcgttagccaacatttgccgccgttgttgaatcaacgccaagcgttggtccaaagtttcatcacctgcagttcgccaatcgatgtattgcttaatatcttttaactgcatacccttttttttcaaacattcaatatcacataaacagtctaaatcagcttgccggaattcacgccgaccagccggactgcgtttaataaacggtaacaatccttgttcttcataataccgtagtgtcggaatactcaaatcatattgttgggcgactacgccaattgataatgccatattaaccttccttatacttgcttaaaaatcaacgtcatctggcaccatgcattgaccgcctaagttttccaaagcactaatttgggtcatttcactatctgttaattcaaaatcgaagatatcggtattttgcgccattcgttcttgatgagttgatttaggtaatggtaacacaccttgttgaatccccccaacgaaggcaaacttgcgctgccgttttgccgtgcctcgtcgcaattgttgcaatcgtttcattcgaaagcgcactggcttcaccaagtggtgcccaagcttcgactaagatgtcatgcgcttgattataacgcacagcttctgcttgtggccagcccggatggacttcgatttgatcaaccattggtttgataacggcggttttcatgagtgcatctaaatgatggggcataaagttcgacacaccaattgcacggatcttccattgcacgccaagtttcagcatttaattcagcatctttggcttcaaattgtttagtgttagctggccaatgaattaaatataaatctaaatagtcaacacctaacgttgcaattgtttgtgtaaaggcagctttcgtagcatcctagccccgttctgtattccatagcttacttgtcacaaagatgtcttcacgcgcgatatcactttctttcaaagcggcaccaacaccttgttcgttgccgtaaacggcagctgtatcaatatgccgatagccaactgataaagcttctaagaccgcttttttcgtttcttcatttggtgtttgatatgtcccataccctaatcctggaatggtaacaccgttgcttaaggtcattggggctgttaaggcagataatttttgcatttaaaagtctcctttttctaatcaataagactactttacaacctcaagctgacttgaggtcaaccattatttgggggcctatcactttttttaaatccgttagtgcttccctaggaattatgcctgactaataagagccttaaactaaacttaactattctgatttttagcggcctaatcccatcaataatcgtatcatgaccactgacaattcctatgtaagggttttatcttcctattttaggaattcgcggtataatatagatatcaaaagtagttaatggaagggagcgagaaacatgaaaaaatttctattaggcagccttatttttgtaggtgttacagcaaccggtgcttgtttattagctaagaaaatggaactttttagagacgattctgtggattacgaaaaattcgaaagccgttagtcactcgtcatttctaaactgaatctaggaggtttttcatatgattaagaaaaaagcaattatgattggcgctggcctttctaacatggccgcagcagtctatttaattcaagaaggcggttggtctggcgatgcgattacattctattcattagatgaccatggttcaaacgatggggcaccagtttccgaaacaaccgatgaatattggaataaaaaccatcctctcgaaaatactaagggctacgttgcacgtggtgggcggatgcttaactatcggacttatgtcgatttaatggatcttctaggtcggattccttcagcaactgaacccaatatgacggctgaagaagatacccgttcattcgatgctcaacaccgcacattcgacaaagcacgtttattagaaggtagtaaaggtattttggatgctggtcatctcggctttaataataaggatcggttattaatgaccaaattgattatgatgcccgattctgaagaagaaaaattagacaacgtttcaattgccgaatacttcaaggacgatccacatatgttccaaacaaacttctggtacatgtgggaaaccacctttgctttcagaacccaaagttccgcacaagaattacgccgttacatgcaccaaatgatttatgaattcactcagattgaacacttagtcggtgttaaccggacacgttacaatcagtacgaaagtatcatgctgccgctgattaactacttaaaagcgcaaggttgtcacattatcctcaatcgacggattactgacttagactttaaagagactcagatgaccgatgaaattacggttactggtatgacaatgactaatactgagacagatgaagttgaacacgttacggtggacgacgacacagcggtcatcttcacaaacgggtcaattaccgattccgcaacacttggcgattataatacaccagcagctgaaaacatggattatggtgctgctgccggtctgtggaaacaagtcgcttctaaattctataatcttggcaatcccgataaattcttcgctgaccgcaatgccagtgagtgggtcagcttcactttaacgactaagaatcatattttgttaaacgaaatcgaacggattacaacgcaaattcctgggaatgctttgaattcgttcctatcaacgaaaccaatcacaccacttggtcaaaaagatgtgaatatgtcgattgttgttcaccatcaaccacacttcacaacgcaaaaaccaaacgaagcggttatctggggttacttcctctacccacgtcgtaacggtgaatttgtggataaaccttacatcgaaatgacgggtaaggaaatgcttcaagaattaattggccaactatcaaaagttgatcctggcccaatcaatattcgtgaaaaagaagctgaaattatggacagtgtcatcaataacattcctgtctatatgccatatgcttcagcactctttaataatcgtgccaaaactgaccgtccagaagtcatccccgaacattcaaccaacttagccttcactggtgaattcgttgaacaaccttatcagatgattttcactgaacaaagtgctgttcgttctggcgaaattgcagcttatcacttcgctggcattccaatggccaagttagtcgatacaccatgttatgatcgtgacatcaagacattgatgcgcgcaactaagaaaatgtttgcttaatccaaaaaagcgcggtagatttttacaaatctaccgcgcttttttctttaattaagcttttttatttcgtttgaccaagctaattacccctattaatgtcactaacagactccaaaacgcaggcacaactaatgtatttgaggcacttatttagctattcttcgagcggcgttgtcgaagccgcatgacaatcccaccaacaacgcccccactaataacgccaattgcgccccattgacttgagagtagtgccaatccaacaattaacagaacaattaatccaccgaatacatacatcataatcgacttctgtgatatatcttgaattcctaactgttgttgacggttacaaaccgtcaacatcatgtagagattagctacttcgattagcaaaatcaccattactaaaaaacggatcagttttcaggaatggtaattgataaaagcgacccattaaaatcactaaaataaagccatcaattaataacgaaccccaatagaagggctttagcttttgcaactcgagtttccgttccttggaattgttggagttgcaataactgtgcttgattaatttcggtatacaaaacgcctgcaatcgattgattgatatagccagcattaatcctttgttgaacaaaatcatattcgtgtcggaaagcttgtacatatcgaagaaaaagcccctgacaaaagtcaggggcttcagagtgaagacaaagcgttacatctcgagaagggaagtaacatttgtcttcttttttatgtaatgatgttaaaaaaagcctaatcggctttgaattaagccaatattttagctaattttttcatatttagacacgcaaaagtgagagcgaccttcgtctcaagcttttcatggccgcactgattagtatagcgaagtccatgatattctttggccgttccaaagtttctttcaattgtttctttacgtttatcataccaataccttaaatctgaatggcggacatcctcacaataatctagtgaatcttgccatacatgacgggaaattactttttgatggttcttagaagcagtacattgtttaattaatggacagttctggcaatccgccggattgctcttatattcatggtatccatcacggttagtagtactgtattttaaaatcttatcattgggacagatgtaacagtcataatattcatcataggcgtagtcattcttgctaaagaatccctttttagtcatcggccttttatacggaaacacaggagtaatctgatcttcgattaattgttgggctattgcaggtattttataagcagaatcagcgacaattagcttaggacagagcaatttaatatgctgataaagtgtgttaaaagcttggctatcatgttgattccctggatgtatcgagtagtctaatatccatccatgttgatcacaagcagtttgaacattgtatgcaaatacttgtttatgctcacctttatgaaaccagccactttcagggtcagtattactaacttttttctgttttaatcctttagatttttctgtttttcttaaaggttttttaccgtgtttttgccgttgattatcaatttcaatatctaatttttctttataaaagacaacgtctttttcaatcatttcattatgatgtttacgattattagcactagcttttacatgcgttccgtctacaaataaaatactaggatcaactaacttagcttcaatacattgatttaatatctctttaaatatttgatcaaataaatcggttcccttaaatcgacgtttaaaatttttaccgaatgtcgtaaaatgtggaacagaatctgttaatgataatccgagaaaccagcgatacgctaaattaacttcaatttctttaatagtttgccgcatactacggataccaaataaatactgaatcataggtaatttaattaataatacaggatccaaacttggacgaccgttatttgcatcatataaattaatcactaaatcataaataaaatcaaaatcaattatcgtatctatttttctgagtagatggtccttagggaccatttcatcaagagtaatatattcaaactggtttcgtccgttgaagttttgagttcccaacatatttaatcagctccttatagatatattatacaaccgcttacatttatcaggaacaaaaaagacaaagccgatagactttgtcttcactctgaagcccctgacaaaagtcaggggctttttgattatactttaaaaataaattgatcaaatgcttgggcgatcccgtccgaatcgttatcagcagtaataaagtcaacgtgcgcctttgcttcagctgaaccgttgcccattgccaccgcagtaccggcaaattggaacattgggatgtcatttttctcatcgccaatcgccatgatttcatccggcgcgaatccaagtttattcgcgaggtattgcactgctttgcctttattaacatcagcgtgcatcacttctaaaaagaggtcagccgcacgaacaacataattatcagttccaaattgcacgtgtacctgtggttcatgtacatctaactgttcgctggtccctgtaaagaccgctttgaccatctgcgtggccgcgtcgatttcattcggtttgcgaatatgaataccagcttcgttttcccaagcttgcaccaccgtcattggtgcaacattcacattactcgtataaatcacactattttgatcgagcacattatacggtaagcccgttgcttgcgagtagtcatcaatcgcttggtaggtttctcggctgatgccagcttctttcaagattttaccagacgccgtttcgataatactgccgttaaacgtaatcacgtattgattatcaccggcaatccctagttgatttaaaaaaggcaccacgccagctaatgggcgtccggaacacaaaacgactttcacaccctgttccagggccttagcaacttgttatttcgtactggctagcagttggtgctgtgaactcaataatgtatcatcaatatcaatcgcgactaatttaatcgtcatctcaaaactcctcaaattgaatttaacttgcacaacgttcgactacatatgtttggcaattgtttcattaaccgctgctttttgatcttcaatcaatgcaacccgactttcgatgactttaatgtccatcgtaatttcccgggttaagcctggggtgttgagcttaggttcaaagaaggctttgaactctgccaaccgttctggggtcttaaagattgcggcaatcgaggtgatatacgttgtaaattccatatcaccgccgactgtctcttctagccattgccaatcgttgcgaatccaatcccaggttgcttgttggctcttgtcgttggcgagtaatccgcggaaccaagcccgcaaatcttgtggtttgatggtgctggcatcttcaaattttccaattaaggtcgcaattaattcaggatcagtcgtgcgcgttaaggccgcagtcaaatcattcttatagctcgcatcactcgtttggcgataagctgctaagagctgatcataaagtgcggcattcccgaagttttggacctcattcatcaagaccagtacccgaattgcggctggtaaggtgaccagtttttcttggttcgcttggaataaagtatgggctacatcaatggctgcttggtttttagcatacaaggctgcgcttaaaacagttgggcgcattaactgatcgtcattgctatcagtcggttgaaccagccaacctaagcgcgcaacttgcgctttactcaattggtcgaagaatcgacgtaggtgttgttcactttcttcaccaggtgtcacaaatttcttcaagttaccagcaaccgtgtaaagggcatctgccacgacatttgaatcactcttggcaaaaggtgctaaaacaggcacaacatctgcgtacgaaatttgacgtccttcagctaataagcgtaagtcttgcagtagttgcagttgtccaattggtgccatgtcagcactactatttaaaatatcatctaataatgtttgatcgtaatgaacaatgaaatgcgattcgttccctacgtttaagcggaatggttgcccattgtcggcgcgtaattgagcataatcaccgagtaccaattcacggtcagtcatcaataatggggctgccgcatagttgctcttcaatggaatctgccattgacgcccaacttcttgaccctcaccgataaagaattgttgttggttaagcgttaattgtccgtcaacgactttggccgttaccactggataacctggttgttcgagccatgaatgcataatggccccaacatctaagttagcggctttccccagtgctgcccacaagtcagcgccagtcgcatttccgaattgatgtgctgcaaaataagctttcaaaccagcgcgtagagcatcgtcaccgattaaagcgcgaaccatcacgagcatccgggcgcctttggcatacacgattgcgccatcaaataacgcatcgatttcggctggattattgacttgcacatgcaccgattggaccccatcagtcgcgtcacgttgtaaggctgccgctgcttccgaggtttggaaactttcccaaatatgccagtccggctgcaacgcatcgattgcgacgtattccatcatattggcaaaactttcgttcaaccaaagatcgtcccaccattgcatcgttactaaatcaccaaaccattggtgtgctaattcatgcgcaatcacagtcgcaacgcggtgtttcgtatccaaggcagtattatcaggatcgagtaataaataagcttcccgataagtgactaagccccagttttccatcgcgccggccgaaaagtctggcaatgccaactgccatgaatggggtaatggatagggtgtttggtagaagtcttcaaagaattcgattgaccgtttagcaatgtccaatgcaaaatcgagctcgtttgcttgatgtgccttagtagcaaagacgccaacttgcacgccgctctccgttttggtttgaaccccttgcaattcaccaaaagcaaaggccacaaggtacgttgacatccggaccgttgtttcaaagtggtgaacgccatcgatgacttctttttcaggcatgttgctcagaatcgtttcgccttcgtgctcatcgaatttaatcgctaaatcaaaagtcgctttggcttctggttcatcaatacatgggaaagcttgccgcgcaaaattggtttcaaattgcgtgccgattaattctttttgcaccccatcgacttgataataagaaggatagatgcccatcattgaatccgttaaagcggcagtataggcaattaccaaagtcacttcgccaggttggccgacttcgactttcaaggcatttgcgtcattatcaactgtaaacggcacactcttacctgcagccgtcactgtttcaatcactaaaccgttctgatgaattaaaacaagtgcttctttagcagtccccgtaattgtcgtccgaccactaaattgtttttgagcccgattaatatctagaaaaacttgataatgttccggttgaaagctttgataaaaacgcatcaattctgccatattatgatctccaatttcatttagaatactgtcattatacgacttttagcctaaaaaagctgttgtcatccattttatattttgattatcagtttggttgcacttaattaaaaaaatcaccttaatcttaaaaaacagattaaggtgattttttattaattctcagtagctaaataccactttgaaacgggctcgcctaagcaatgccttgtgtttagctacatcagtcaaacaactaactgcatcagttattcgcctgcttaggctaatcgcttagtcgaccacttttttaaacttgttgtttagctgggcgaattaagacttcactgaccactacatgttctggttggtcaatcgcatataagactgcgttggcaatgtcttctggattgagggccaacgctgattcttctggtgcatccattaattgcttaaccccttcgaaaacagcagggttgccaatcgtattcaccaattctgttttaacagcccctggtgaaacaatcgttgaacgaatgccgttatctttttcttcttggcgcaagccttccataatagcgcgtactgcatatttagtcccgttataaacggcagaagctggataaaccacgtgcccggcaaccgaatcagttgaaataatcaaaccatcttgttgggcttgcatcgttggtaagaccgccccgatcccgtttaaaacgcccatgatgttgatgtcgagcatcttttgccattgatcataatcgcgttcgctcaggtttccttgtggcatcacgccggcattgttgtataaaacatctacgcaaccgaaatgatcaagcgccaattggactaagctcgccatttgagcccgattagtcacatccgttgcttgataaatcgcatttgcaccgatttctgatgctaaagcttgtaaacgatcttcacgacgagctgctaaaacaaccttagcccctttgcttgctaataatttggcagttgctgccccgatacctgatgaggcacctgtaatgatcacgactttattttgaattgacatgttaaaactccttttctaatttgatttgacgcatgacttttgccggtgtcccggcgacaatcatattgtctggcacatctttggtgatcgtggcgttggcagcgacaatcgcattttcgccgaccgttacccccggtagaattgttgccccggcaccaatccatgcgttctgtttgatatgcactggtttaacgaataaaccacgccgatcaggcttttaaagaagccctcaccaaccagaccaacaaaaagccgccacgctaagcgtgacggcttttttaacccacttggtttgcgaaattgcttaatttatgtccgttactttcccaaaataggggctctataatgcatattgaatcttatctggaggtcttttgatgatggaaaaaactgaaaaaatcgcaattttagaaaaactggtctcaattgatacaacagaccaagcagaaggtgtgattgccgactacttagccgatctattcgcacaacatggtatccatactgaaaaagtggcttctaaaccaggccgcgaaaacttagtggcctatctaggcgaagcaaccgacaaattcctcggtgtcactggtcatatggacgtcgtcagcatcggtgatcgcagcaaatggacgagtgatcccttcaaccgctcgcgatggtaaactcttcggtcgaggcgcaaccgacatgaagtctggtctggctgcgcttgtgattgcaatgatcgaattacacgatgaacatgttcctttaaacggccaaatcaaactactcgcaaccgtctatgaagaaaagaacgaaactggtgcgcaaactttaaccgctcaaggctatgccgatgatttaacagccttattagttgccgaaccatctggcgttgataaacaagccttggcaaataaccccgacaaattccccacagaaatggcccaaaaactccttgcggctaatcaaaccaatgaacaacatttcttaattttcgcccataatggttcccttgattttaaagtgacggcaactggtaaaaccgcgcacagttcaatgcccgcactcggtattaacgcaattgatcatttgcttgcctaccacaatcggcaaaaacaatacttcgatcagaaacatcctattgatgatgtcctcggcgatatcgtgcctgtcacaaccttaatcaacggtggtgaacaaattaattcggtccccggtcacgcagaacttacttgtcgggttcgtacaacccccgccttaactggcgaccaagtgattgctgacctcaataccatcattgcggaactcaatcaacaggcagacatgaatctggaattgaccgtcattaataaccaaccacccgttaagagcaatccacaagcaccattcattcaagctgttcaaaaaatcggggcacaaaagttatcccaagcttatccactgatgcacgttgctggcggtaccgacgccgcccaccttgctaagcacaatcctgacttaccagtggcagttgtcggccccggcaatgatactagccacatgattgacgaatatgttgatgaagaaatgtacctcaaacacatcgacttctttaaagccgttatgctggattacttaaaataacaacacaaaaaaacatcacctaatatatgccctacttaagagcttatcggatgatgttattatttaatcgtgatacgccttcaagctatttttaagctaaggcagtattgatttcttgtgctaatgtttctttccgttgtaacccaaccatttgttgcactaattggccatctttcatgaccaacaaggttggaattgattggatgccgaattcagccgccaagttttggttgtgatcaacgtcaactttggcgattttagctttacccgcgtaatcgtcggctagttcttcgacaattgggccttgcatccgacatggtgggcaccatgttgcccagaaatcgactaatgtgaccccttcttgaacttcatctttaaagtttgcttcagttagaatttgtgttgccattgcaatcacctttcttttcaagaaaatcattcaacgatttcattgaattactcatagtataccaccattgggacgtgccgtcaaaaaggacgcttcatcttattccgtttcggtcataactcgcgaccattcccacactgattgattaaacgttgccactttaaacccagcagcttgtagttgttgactggcaacattggcgtaagcacatagacgaccacgacaataaaccaccacttctttatccttggggagctcagctaatcgttgatccaactgatcatatggcacattgcgtgcccctggtaagtgttgacttgcaaactcatctgcgggacgcaaatcaatcaaacacacatcgtctgccattaatttcgttttcaatgcgtcaccagttaacgcttcgggggcacctgtttcttgcgcgagtgttttttccaaaatcgtcatctctggcaaagtttcttcgcagacatcaaccaagagggttaccaattgtttgacccgttctgaatttaaacgataagtaacaaaattcttctcgcgttcaatcgccactaagtttgtttgtttcaaaatttgcaggttccgtgaaacggtagcgacacttaagccgactgtactggctaagacttccaccgttttggggccttgcgcaagaatgttcaacagttgtagacgcgtcacgttccctaacgacttcccgactttgaccacctgctcataaaccgcatcccggtattctgtaatgcgttcatccactttcatcgcctcccaacaatcaacgcctttattgaatagaatcaatttaacatttctagacaagcgggtcaactaaacaagctaggcaattaaagtaagacacctcagttaattgctttcttcaaatcaacggtgccctgattagcttctttatctgtaatttcaaaaattagtataaattgccactcttgaccgactttatcagttacgttcatttcagtatatttccctatctgaattcctaattaaatgaactaatgtctaaaataaaaaaagaaccaccactcaagctatgtactagggtcctgtcaagttgccggatgaaataatataaaattggtagattgcaaatttaatccgaattttcggacaaatttgtcagcataacctgatacggtgtttgccagtcgagtattttaagcggtcgctggttaatttggagtaacgtcgtcgttaaatcttgagcactaatgtgctcaaaacgagtccctttaggataaaaataacgtaaattccgattaaagcgttcattactaccacgttcagctggcgtataagcatggcagtaataggtcttaataccatattgtgattcaagtgatactagtccactaaactcagtgccacggtccacagtaaagctgtgcaccggaccattaaaagtggttaggaacttagttagtgcttcattaacagtcgctgtcgtccgatcttttaaccggtatgcccaaaggaaccgtgatttgcgatcgattaaagttaataaaactgccttactatgcccacgaggaccaacgactgtatctagttcaaaatcgccgatgcgcttacgttgattaatcatcatgggacgctgttcaattgatcgccccaaagattgattatatttggatcgttggtcaacgttacgccgttggcgtacgccatgttcaggtagatcattcaaggagaaaccaattctcccctgatttagccaattataaatagatttagtagctagtttaaattcgtgagcaatcattcctggtgaccagcttagacgtaaatggttgagaattttttgctttaactcatcgctcagcttagttttccgaccacatcgtgatcgcttgtattcggcatctgtttgtgctaattcagcctgataaggttgacatcgagataattcataagaaattgttgacggtgatcggttcagccgttgaacagcatcccgtcacttttaagaatatctatgaaatgcaagtaactgctaacgtctttcttcccaaagactcgacggaaactgtttttccagcactaatcatcggtgctcccatcggtgccgttaaagaacaggcagctaacctatatgccattaagctcgctgaacaagggtttgtaaccgtttcatttgatcaatctgcttggggcgggagtaacggtgctctgcgcaacgcgattgcccctatcttatatgcggagaatttctcagcagccactgactacctaaccactctagactgtgtcgccaatgaccgtattggcttaatcgcaattggttcggccggtggtttcgcgctcaacgcactcaaaatagacgcacgtattaaagcacttgcaactattaacttaaccgatatgggtgccattgttcgcgaacagcgtgatgcactaggcggcaacgcattaatcgaggaatcctcacgatcccggacattagagattgcaggtcaagcaaccacttacgcccatggagtacctgaagaactggacgaaaactcaactgatatcgaacgtgaattctacgacttttatcgtacccaacgtggcgcagccaactcgacactccatcccactcgtacaacttttactaaactattagatttctatccattgcgcgacctcgaaacgatcacagaacgtgccatgctctttgttgttggtgaagaggcatggtcacgacatttcagtgaagccgcctttgccagtgctaacgaatcaaaacagttattaaccgtaaaagcagctgggcatgtcgatttatatgatcgtatcgcgcttattcctttttcagaattaactcaatttttcaccaaaaatctataacaacgcaaaaaaataccactgacagcgaattgtcagcggtatttttatattatttatcattcaagtaggctttgactacctgataatttttgaagcccccactcaagttatacacggatttaaaaccgaggttcagaagtaaattctgagcagcattagccgtaacccctttattgcaataggtgacagttggaatatccatatctaattccgtgaaccgatcacgaatttcagcaagcggcatgttaatggcatgttcaacatgctcgtccgcatatttttgcttcgaacgtacgtccagaatctggaagcgttcaccttcagccaagcgttgctccaattcagctggaggcaagagcggccgcccatgcaatgcattatcgagcgccattcccgtatagagcactggatccttagtggttgcatagagtggttgataagctagatcgagatggaataaatcggccaccttcgcacccaatgtgatggcagtcacgaaaacgtcaatccgcttatcaaccccatctttaccaatgatttgtacacctaataattttcccgtttgacggccagcaatggctttaatgacgttttcggttccatttaagtaatctgcatgccctggtttaatgttgtagagtacttccacatcatagtccttagctcgcgcgactgcttcagtaaacccagtctgtgcaatcgttgtatcgaacaaccgaacaatccccgttccaagaatcccgcggtgcgttaagccaccgccagtcaatgaattgccggcaattcgtcccattttattggcagtcgaacccattggtcgatacagtggtgagccatcaattacggagaaactctcaacaacatcgccgaccgcgtaaatattcggtacagtcgtcaacatttgttggtcgaccttcaacgcccctgaaggtcccttagctatcttcatatggtcgaccaactgcgtttgtggttcaacgccaagtgctagtaggaccaaatccgtttgaatggtcgtctgattactcaattctaccgccgataccacaccatcctgcgcagtcacttgttttgcggttacactctttaacacatgcaccccgttagcacgaataacttgttcagcacgataggccatatcaccatcaaaatgggtcataatttgcgcgcttcgttgaactaacgtcacgtccaagccacgtttttgaaattgttccatcatttcaagcccaacataaccggtcccaaaaatcgtcacattttgaactgaatggtgctgtaaatacgcgtcgattgcgcgtgtatctaccatgttatgcatcgtgaagacgttttggtaggcttcatcgaacggtgcaataatgcgtggcgtggcccccgtcgctaaaactaggcggtcataataatcttcaaacaactcgcccgtctcaaagtttttcaagaccagcgcttgttggttttcatcgattgaaatcacttcgatacccgtcataatgtcaacgttgaagcgttttttgaaccacgccgcatcgcgcggaattaacgtctctaggtcttcaacctcaccccctacgtaataaggcatgccacaaaccgaataagaaatatcctgacctttttcataaacgacaatctcatcaacttcactatttcgccgcgcctttgctgccacactcgtccccgctgcaacggagccaatcacaacaatcttcatgatcatcaccaatccttattatatttaaagacaatataactcattttaatcttgaatgaaatccatttgttttcgactcccaaattgcaagaacaaattagccacacgataaatcctattaaatcagtattttcattaatattcatattttatggacttaacttaaccggcggaagcagcggagaaaagctctttgggtgtttgatagccagtttgccggcgcggtaaattgtttagctttgactcaactgcttggatatcatgaggacccaaaatatccatggatagacccttgggtacatcgcggcggatcattcgattatgcgcttcgttagtcccacgctcagaggaacgagatggatgggcataataaaggtcagcgacaccggtaagtacagcaccaacttccgagaactcagcgccattatcggcagtaactgacttcatgattgatccgtattcttgacagatcttggccagctcatagttgactgaatcggcatcacgaccatctggatgtaagctgattcctgagacaacttttaagagagggtataatgaataaatcatctctcaaaaggaaggaatttttacatgccaactcgttacgacaaagaattcaaacaaaacattatcaacctatataagcaaggcgaatcagctgcccaactggccagagaatatggcattggctattcaacagttcataagtggatccagggccaggccaaaactcaatccggtaaatcgccagacaaaatcaaagcgatggaaaagcgactggcttcgctgtctgaggagaacgaaatcctaaaaaaagccctgggcttccttgcgcagaagtaaccaatatctttgattacattcaccaagaaagccatcaccaccaggtaaccaagatgtgccgaatcctccgagtttcaaaggtcgatgacagtgggctcgattagcttcgtacttagcttgtgctgtttctggtgagtatacagcgtaatattggcgttgaccattcactttttttacttggtcgatctcgccgcggcacaattcattattgattgtttgatgacaaacattaagcgctctggcaattgcacgattggaatagccttggctgtgcagcgtagcaattctgcctcgttcaaacgaagttaggtgctgacctttttttctgactgtggtattctgttcttgcatcaagacaataacctctttcattgtttgtgtaggaacatcaatgataacagagatttgtcttggtgttttttattttatcaattagctaaaagtatttggctaacttgattataaaacgcgcgatttttatttggaggttcttattatgtttaatggtctattcaaagatctaacaccaaggtcgtttactggtactgcgtcgagttattattagtatcgtgggtctctgtgtcttttcagctttctttattatctttggtgctaaagtaacttttgaaattcttgcaatatttgctcgagatacgactacatttgtcactgtgttgctttacttgctttcattatttatttttttaatcgggttcaaaaccaagattactcaaattagtgttgttacagcctggattagtgaagtacagtttttatttttgttattctcgccaatttggcaaattcacgctggaagagaagttgcgttctatgttattttggctatgaggattctggtcacagtattactggcatttcttttgtatctatatcatcgcaacaataaagcaaatcgaaaataccgtcgataacttaatacaaaaaaataggctagcccttgagggactagcctatttgaatatcatcaataaaaatcgcgttcaaattgcattaaatcattgattaaagacgctgcttgcttcaattcagcatctttatatttttcggtcaccttatcaataacttgcgctttcagcgtttcatgcattttatcgtggctttgcgcaatcacacggcctttagcggtcaaagaataatagatttttttctgatcatctggttttttagtcgcttgaattaagcccatttgaatcaacttcttagcggcgcgtgtaatgccgccacgcgtaaccgccaaccgatccgctagtgctacacctgttaattcttcggcctctaatcctgataatatgtgcaatgcaatgattgatagctgcggaatcatcgttttcaagttctcatcactcagctgattttgcaaccatttttgttcttgaacaccgcggccgttgacactatctgagcgtaattgcttgattgcatgatagagtgccatcactgattcgttttccatttgcttaacctctcatcaattgttaccaccagtatacaccaaattagaatactttagctttggtcgtcgcttccgttagggcccgtgctaatatttgttcacgttgatctgcatgagcatccgcgccttcaatatagacgtgttcaacttgattaacaccatagaatttcaacatattggttaaatacatatcgcctaaatccataagtgcagaactttcgttactcttaatcttaaataaacggcggaacaagaacttaacgatcccccacttgcccccagcgtgataaacactgccagctgcttggatatggattgctttcttaccttctaacaaacctactgaaccgttcggtgtgtatttgaatgttttgtgggcgaccgccgtcaaatctaaacctgaataattcatatctttaacagtttttctttctttgcctgttatcatcttgtttgtccgtgatccaaaccaacaccttttaggtgtttaattgcgtatacaaaaagagcacagcctgtgctattgttaagtcgaccaaaaccaacacagaacaggagtgctccatatgtcgactttacaacaacaaaccgttaacttcaacaaaaatctggttctttctaataatggtggtcatttatctaacgatgcgggtctaattttagtggctgaatttatgcatcagatccactttaagcgccttttgaaagaaactctccattttaaggaaaaccgcaagttctataggtaccataagaaccagctgtttaaacaactgttgattcagctgattgcgggttatttcgacgatactgccgctaataaactgaccgcagacatgagctttgagcttgttttagataatttagttgcttcgcaaccaactctttcacgctatatcaaccaaatttccgcagacgacttggccgggatcacaaaattagtcgccaagttagcgcagttagtgatcacacaaaagaagcaacgtcaactgatcattgatcttgattcgactcattccgatacatttggttaccagaaaggcagtgcttttaacacccattatcaaacgaacggttatcatcccctgttggcttttgatggtttttcgggttgtctcttaggagctaaattacggccaggtaacgaatacacttccaaaaatgcggaagcttttttgaaaccgctactgaaacaatacgctgctttagatgtactagtccgggctgactcgggttttgccaagccagaaatttatgccgcctgtgaagaagctggggcaaagtttacgatccgtctcaaggctaatccaaaactacaacggatcgccgagcacttgatccatgtggggcaacctggggaagacttcgccgaaaaagatgtccagtggcaccgtttgacagattaccaaccggacacttggggtcgcgcttaccccgtgatcattaaatcaactcgccctgctggcgagctactctttaaacacgaatttatcgtgactaacttggagctggcttttgccagtgacgtctttgaactctatcaccaacgtggagccatggaggatctgatcaaagaagttaaaagtggctttgcctttgataaaacggatagttccagttttacggctaaccagtttagaatgttactcgccggtgtggcttataacttagttcaagccatgaaaaaactggttttcccagctgaattagggaacgcaacgagcgccactttacgtttcaagctctttcatttggccggcagagtcacccaacatgcacgtaaattatggctgcatctttctagtaccaatgtttttgatgatttatactggcaaacattgtttaggattcaagaatttcagctcactagtaattaaaaaagacaatttaaaaaatttaagtacgatcaagggagtagtttactcttttgacaccaatcaaaaataaaattgtcttaaaaatagctcaaatacactcaaaaatagttgcggattaaatttgagctaaattaaacgttaaaaggggcaaattacctttacgcaacaaagtatgaattattcaggctaaatattgtttcatctcagctggtaaaaaatgattgtacattggattgatgaagacatatttatcagcttcgataaattcatctaaccaatctgcgtgttgttgtaatagtgttttctcagcttcagccattggttcgtcaaatttttgtttacgccatgcagccattgtcatatcgttcaatggtggaacacctgcttcagtatatagatctcgaataataatttgatcatcaggatgggtccgacgataagtttctacaaagcgggtccctaccgctagggataaactcttttcaacatggggatgtgcttggattactaataatgtactcatttaaaaaaaccttctttagtttcgtttagttgcttgtcaacaaaataaagattatcatcgttttagttgcttgtcaacaaaatgttttaaattaccgttagctatcaaatttagctgaagtgccctagtagcgccctaacgtgtcatttttaagcaaaaaaaataggctatcccttgagggactagcctatttgtgtaagcttattaaacatgctttttaaagctgattcctgtgcttagctacaatccgcaaacaatcgactaacgttgattattcacgaagttaggctaatgctcagaatcaacccgctttaaacacactctttaataattagtttaatttcttcttgcttacaacattcaagttttcgtctaaatcataaacaactggttcgcctgttgccatttcaacgtccatgatgtcttcatcagagatgttttcgatgtattttgttaaggcgcgtagtgagttaccgtgagcggctacaatgatattttggccgtcgattaattttggagcgatttcgtcttcccagaatgggataacacgttccaaagtaaccttcaagttttcgccaccaggaattgcttttggatctaagtgtgcgtaacgacggtcgtttgctgctgaaccttcatcacttgcatccaatagtggaggaagtgtgtcgtatgaacgacgccagatgtgaacttgttcgtcgccccatttttcagctgcttcagctttgttttggccttgtaatgcaccataatgacgttcgtttaagcgccatgatttcatttctggaacccataattgatctgaaccttcaagtgcatagtgtaatgtcttgatggcacgagtcaatactgatgtgtaagcttggtcaaaaaggatgccttcttttttcaataaagcaccagcgttttgagcttggcgtacgccttcttcgcttaagttaacatcaacccaaccagtgaattggtttgataagttccattcactttgtccgtgacgaataaaaactaatttagccatgtgtaagtaacctcactttttttatttttactctgttcattttacactgtttgctacacaatttacagtcttatcttttcagaaaataatgaaccttctttttttatgctcgatcagtcgttttcgtttctttcaataagaaaagcgccgccaagatggcaatcaccatgagcactagcgacgtcgttacaacagcgatcatccctttatcaaaagccgtgacaacaatttgttggacctttgcggcatacggtgtcttcactaattgttgcccccacgcgattgcatgtcctgaaaaagcacctgcttcaaccaatgcttgctgaatgccagttgctgccgccttcgggattgagctaccactaaagccagtcttcaaactcgtttcgtaggcattcgtttgtgataaaccgagaatcacaacaccgacggtaattccaatttggcggaaaacattcaataaaccggatgccattccgatttcttgaggattaatattatccatcgccgctgtattgatcattggattgataatcgcattgcctaacccagttagcgcaagcaatggtaagagttgcatataagtaaaatcagtcgttgtcacttgtctaaaaattaataaaccaagggcagaaacagtaaatccaaaagcaatcaaccattttttaccgaatttatagcctagaacacccgtgaatggtcctaaaacaaggaaccataaactcattggcagttgatgcacaccggttgaaaaggctgagtaacccatgtaattttgcatcaaactcgtttgataagcggctaaggcaaaaatgccagcgcctaatgagaaagctaaaatcacaacacccacgaaatggcgattcgtaagtaacgtcaagttcatcattggtgcttttgctttcaattccacaaagacgaaaagcgctaaaattaaaacggaagcgactaaccaccccataatgcgcatatctgtccaagcccagtgcatatgttgttctttttgaatcaacccataaatcccggaaaataaactaattgctgacaagatcatccccataaaatcgattgattcgcccgcgccataagctggtgtttctttaacattgcgaatcactaagtaaactgaaataatcccgactggtaaattgacgaaaaagatggatggccagccgaagttttcgactaaaaagccccctactaagggtccaatagcagttgaaaaaccaatcacggagcctaaaatccccagtgcagtcccccgttcgcgcccttcaaagttcgacgccactagtgccatcgataaactcatcatacccgagccaccaatcgcttggaccgcgcgaccaatatctaataccaataaatttggtgccagtccgttaacgacagaggccgctgtgaataaaatcatactcatgataaaaattttcttgcgcccgaacatgtcccctaatttggaaacagtcaacaagctgaccgcatacatcaatgtataggcgttcaaaacccattgtaagttgctaaaagttgttttaaaatcaatcgccatacttggtaaagcgacattgacgacagttacgtctagcaatcccataaagacacccagactcatcgcgaccagcgctatccagcggttggttgtttttttcattttactatctccattttctctatctcatttatttgtgcttgtagccaatccattttggctttgatcgttgtgattacgaaatcggttgaacgaatctgccaataataataatccgtcattgtctcatccgcatcttttaattcagttagatgtttttccacaccgctataaacatgtaaatcttcagccaactcactgtagaaatcttgtaaaatgctgacttgttctgctgcatcaatgtagtgcatcccacgcatcttaaagcgataagcatcatcccactttgcatcatgaacgactggtttagccattaattcagcaaaatagcgccgtccctcttcagtaatgtgtgcaatcttcgtgccacgtgaatcctgatcagcttcatcaaacccaatgcagcctttgctttccaatttatctaacaacggatacaaaaccccatttgaaattttccgtctgggcaccatcgcattttccaagataatccgcaacttatagcccgacatattccggctcattaaggcggataacatcagcaattcatacataaacgcataacctctctctttaatcagtcttttagacaggtctttaagacttattaagtatagttctttccgacatatttacaagccttttttcatttttagacaaataaaaaaacatgatccgcataagttgcctgataacaaggcttcatgcggatcacgcttttatggatttagggatgtataggttgtacactctctctttcaactaattcaattgaaagtactttttgttgtggcgcaatagcaggctccacaatccggttcaataatagacgtgttgcttcttgcccaagctcgaaaatcggttgcttaatggtcgtcaattttggtgtgacatattcacaccaatcgatgttatcatagccaatcactgagatatcttctggcacctgtactcgtaattcacgtaacccacgaatcaatccgatagcgagttcatcattgattgcaaatacagcagttaccccgctatcaatcacctgtcgtgcaacttggtaaccacctaatttcgttaacggtgtcgttatttgccactcatccgccactggtaattgggctttcaacatcgcggcttgataaccaatgaatcgttgttcgatgttccaagctcgttgttctggtaaaacaattccgactttatgatggcctcgttcaatgagataccgtgcggccaactctccaccttgcgtatcggcaaccgtaatttcatctcccgcatgttgtttatctgattgatctaataagataaacgggatttgtcgtttttgcagatagctatccaacgttgttttttgtaaatgagggacagccaaaataaagccgtcaacatttcgacgaaccaattcctttaaataatgatcaactttctgattatgcgcccctgcactataaattaatgggatgaaatcgaattgataggcaatttcttcgacaccttgaataaactgactaaaaaaaggattattgatatccggcaccaataccgcgatcgtcttcgtttctttattaatcatattttgcgcgaaataatcaggttcatactgaagtctttcccgagcggctttgacccgcgcaatcgtttctgcgctaaagcgctcacctttattattaagaattaacgaaactgttgtgaccgatgtttgcgccagcgcggcaacatctttaatcgttacttttcgaaccattttggcactcccccgaatcaaattaataaaaacacccacagccggctagccatggacgctgttaatatgattataactgaatatccttttcataaggaatcgaattttgcgcccctttagtttggactgcaatcgaagaagccttattggcataagtcattgctgcttcaatgttactgtaatccaattcaagtttcgtacttaaagcaccgataaaggtatcaccagcagcggttgtatcgactgcttgaactttaaatgccggtacaaacccggttgttgttggtgttgcatagaatgagccctttgccccaaccgtaatgataacgactttaatccccatcttaaacatcgcttccacgttagctttcattgatgcttcgtcagtcactttaatccctgtgataatttcagcttccgtttcattagggacaatcatgtccgtcactgccaataattcagctggaatatttttaatcgctggtgcagggttcaaaatcgtttgaacgccgtttgaacgggcaattttgaaagcttcaataattgcaggaataggtacttcgaattgagcgacaattctgtcagcatctttgatggcttcttcggcttcatgaatatcatcgactgtcacatcttggttggccccaccatagattaaaatactattttgtccactagcatccaccatgatgtaagcttggccagtcccagctgtttcagaacaacgaacgtgatcaatgttcatgccatcttttttgaacgtatctagcatgaaatcagcggcgccttccttaccaaccttactaatgaaagctgtttgcgcacctgaccgaacagctgcgattgcttggtttgcacccttaccaccaccagcaactgcgcggccatccattgctaatgtttcacctggttgtggaaaacgctgaacgtttaaaattgtgtcgacatttgttgaccctaatacgattacttttttcatttgaaagccctcctaatggttaaaatacaacgccactttctaaaataatgttggaataaggtgtcatttcacccgtccgaacaaatgctttggcctgccccaagtcctgtttcatttgtgcgtgatcaataaattcaatgggcgtctcaccaatcacttttttgatttgttcaagttgtgctggattagctgttttaatttcgtttgctaagtaaactttttgaatttccaattctgttagaacatttttaagtacttgaataaaacttggtacaccattttcgatggccacatcgattttttgcgttccagctgggaccggcatcccagcatcgccaatactcattgtatcaaaatgtcccatgtttgaaatcacatttgaaatttgtgaattgataacttgtgtttttcgcataataaatccaccccactttttatttgataaaggctgtcacagatccagccactaatacgagtactaaaccaattaatacggcaaccatttcttttttggtcttttgttctttcaacacataaatcccaccgattgtggcgaaaatgacactggtttgggataaaacaaaccccgttgctaagccattcacagaaggttgtgctgagataagatacgtcagcgctgcaaacgcgaagaagaacccactgaagatattcttatacgaagttgcttctttgaaaggttgataagtcttgctggtttgggttaatccgaagataacacctacaattgccattcctaatgcttgtggcaaaaagccttggaaaccgtccgcgtgtactgcttgtggaaaggcggagtaccctaggtagcctagttcgccaactaataataacaagatgccacgcaccgcgccatttttactagcgcttgaacgatcttcactccaggctgttaaataaacaccaaggataattagaataatcgctgtgaacccaatcaacttcgattgtgtacttgcccagttacccaagatgaagacgccccacaaagatgccccaacaagttggaacccagttgtgattggcatcgttctagaaacacccatggtttcaaaaacatgaaaggtgataatctgcgctaatgcccaacaagcccctgaaattaaacaaaaaataaatgttttggtttctggaatcggtgtcccgcggaaaatagccacaataatggccagaattaatgtcccaagtgtcgttccaataatttgactcgctggtttcccaccaattttaccaacgatcacagggaacaatccccaaccaatcatcggcattaatccaattaagatattgacagcattcatattcaatcctccgtcctttattctaggctagtaaaacgttttactaactatcatggtgattattataaaggagcttctttgagaattcaactcttttttgtaaccgctttattaaagaacacaaaaaagattaatctggcgcgcatttggcctgattaatctttttttaatttattttttctttgcttgtccgtatcctcgtttagatttataacctgcatctaaaatttgacacatttcaacataatgtcgttgctgtgtttcttcagctttagcgccgtaaacataacgtgcccattcgcgttgatagcctggtgttagtgcgtcgaaaaaggtttttgtggctggtgtatcttctaatcgagcactcaatcggggaatctcaacttcatattctgatagtggtttttgtggcatggtgcataactcccttattttaaccgcataacatctctggcaatcatcaactcttcattagttggcacaatcaggaccttaacgcgtgattgatcactgctgataatgcgttcttggctgcggacattatttttatcttcatccaattctacaccaaaacaagcgagttgttcacaaatggcagcccgtaattcactgccgttctcaccactaccggcagtaaagaccagcgtatctactccattcattaaagctacgtaagaaccgacatacttcacaactcgattgacaaaaatatcaagcgccaattgggattgtggtcgtgagtcagcggtttcttctaaatcacgcatatccggtgatagttcagaaatccctaataagccagacttatggttcaaaattgtgatcatctctggcattgtcttacctaatttttcagctaaaaaggctactaatgagacatcaatatcaccagatcgcgtgcccatcgtaatccccgcaagtggtgtgaaccccattgatgtatcgacagcgtgcccgtcttgaatcgcggtaattgatgcaccactgcccaagtgcaacgtgatcattttttgcgtttcaagcggctgatctagcatttcagccgctcgatgagcaacaaaccgatgactggtcccatgcgcaccgtatttacgggccccatacttttcataatacgcttgcggaatactgtataaatagttttcggcaggtaacgtactgtaaaatgacgtgtcaaaaacagccacttccggtacgcctggcaataatgcagtgaaaattttaatgtaataagcttgggttggattatgcaatggtgcatattcagccaaacgattaatctcatcaagcccgaccggattaattactgcagagtccttgaaggcttctccaccagcaaccacccggtgaccaacccccgtaatctcatcgagatgggttacgatatttaattccttcaaccgcgttaataataacgttgctgcttgttcgtgcgtcgtaatatcttggacttgtttaaacttttcctgattgccatacttcactgtgaatacagaatcagataagcctaaccggtcaatcattcctttagcgattactcgttcagacggcatttcaaataattgccacttcagtgttgaactacctgcattaatagccagaattttttccatgatatcgactcccactctttcataatccgttcatggcttaattgtaagcaatttcataaaaagaaacaagccctattatatcagagtgcgtcatcaacgggtaacttctgagcatttatctaacttagcgaattggcgatgcaatcgccgatttgataagtgtagcaaagcacaggaagttattgatgaaagcacgtttaaggcaagaatgcatttggttgcggtcagcaactgagcattaatacaaactagcgcttaatctcgattttaagattaagtgctagtttgtattaagcggaagttgttgcaaccaaaaagcacgttttatccataaaaaaagaaccgcccccacgcggttcttcctatttcataataactattctgcactttcttcgttcattttctttactttatttaggaatgaacggcccatcttgttatcttggtattcacttggttcaatgacatctaaatagaattgatcaatgaatcgaatcaaaccatcgactttatcacggcccatttgtgcttcgatttcacggtatttttcaacatagcggctcaccaaccggtctaaaacgtcttgaccttgtttagttaagctcaaaaatttaacccgttgatctgtttgaagatgttcttcaaccacgtacccattttctttcagtaaccgacattggcgtgaaattgctgaacgactaacactcatcgtcttagctaacttactacctgttaagttttcgttagttgaaatttcgtacataattaaaaattggtcaaaagaaactttgtaatttaaactttctccactgacaaagtcgcttaaattgctgacaatccaccgataaatcaatgaaagatgcgttactacttcccaatcatcagaatacttgcttgttgcttttgctgtcataaccttttctccctttactaaccgatctgtcatgcgtagaaacaattaacggatttaatttattttgctatcaatatattagcatattttgagagaaaagaaaccactcgattcattaaatagctataaatagatttgatgtgcaacaattcaattgaccatataatcatcaacccactatattagtttgtcgtgactatataaaaagaagtcattaaagataaaattattttcatccttaataacttcttttaataacatcttacaggttacgatccatattgaacgtcaatttcgataaattaatgcccgacataacgagttccccaatcatcgaggtcgcttcagtcgccatctgcttaacaatcgcatggttttgctcagtcaaatactccgttaaggcagcgccttgatacttttgtgcttccacttgaatggcttcaatcatcgttcgtaattcttgcttacaacggtttaagtaatctacattgccttgaatgtgctggctataatggccttccaccaatactgaaattgtccggtataaccaatatgcactcttcatatcccatttcattggtgtttcgctgaaacttagatccgtatcgttcgcattcgtgaaaaatggaatgaacggtgtatacgttggcatccccattgtgatccacatgatggccgcttgttcctttggcacatcattccgtaattgtaaaatatgtgcattttgcgtccgattcaaaccgattgggcggtaacgatacttgtcggcatcagtcccatgccccattggatcgaatggcgtttcattataatgtgagcctaacaacatttcaatatcttcaacactaattttatgttcaatacgccgaataaatggtaattcagccgattcgggtgacatatcaaaatcagcatcaaataaatgatgggcgtaccaaacccgtggtgtattatagtgccggtctttttcattcatcgtgccaaaaatatggcggaaattccagcccgttttatccggattcaaatgatgggcttcaacgtattcttgaatgccttctgcccacataaaattgtcggcatccgtgaaatcaacttgttgaatcgccacttggttggcggcaactgcataagcatcatctggaatccgttgtgctagccataaatgccctgtcacaatttccatataccacacttcattgtgatcactgaagagcacactattgccggcgggtgagccgtattgtttaatcaaattaccgagatagctgaccccttcgcgcgccgagttaatgtacggcgcaaccatagcttgcatgcaatcttcatccaacccgtctttcaccaatggatcataagcgagggctttttcatttccatatgtactttcggtacagctcatcgccacgttaacttcgttaatactactttcatcataataaccattatgtttgtaatcaacattcggaacagcgggccatcggtagccattctcaggtaattcggcttcaaacccgtttaaccaagatttaattttagcacccttacgccctttaacagctggattgatgtgaaaccgttgtggtgttaaaggtaaaaaagtatcgtcgttacgcgcaatcatcgttgatccgtccaatgatgcgtttttaccaactaaaattgatgtacatgctgattccataagttgcactccctctgatgaccactttaattgaactcatcggtcacgtttgattaaaattttctcataattaatatccatagtgtacgcttctcacttgcgaaagtatagcctgatttgttgattaatttcctttaacccccgcatttattgcgatttctatacaatattggatttcacgttaatttccgatttcggaattatcgtcaaacgaccatgttagcgctcctaatttcatgatatattattagatgaataactaacaacaaggtggtttctcaatgaaaaaattaacacttgctctattgctgaccatgaccagctgtttcatgattctagctggctgtcagaataaaacagaaattccagctgccgcaactaaaacagaagaaaaaattgatcaatacgtccaaaaagtgaaccaactctatagtgatggttcccgtaaagatcctgcgaagttaacagccaataaacaacaccaaattatcactgcggctgacaaactcgacaaacaaatcacgcccaacctttatatgagcggaattagcgctgatgcaaaggctgattacaaggctgcccaaaaagatctagataagattactggtaagcaaccagcaactagtgaatctgaaagtgttgcttctgaaaagcctgctaaaaagaagaaaaagaacaaagttaaaacaagcgcctttttcgataaagatgggattgtcaaagccgatgcacaacttggtgaagaaacggactataccgaccaccccaaacaacttgctgattatcaagaagctaaaaatcaattagcggctatggcagctgtccggaacttatttacagacgacaacctcaagcatattccagctaacctatctgctagcgacttcccttacgtccgagctttgattaataaatcaacccatgacggctttaaagaaaagtacttggcgtatgttaagaacgctgaaaatcaatacaacacttactctaacaatacccaagcggcaaccacgcaaaacacaacaaccgctaatcaagcaacaactaaccaaaacacagctaccaatacacaaactacgacaggctatgctgctaacacggcaacggggaatggcactggtgcaacaactggaactgggacggggacttcgacaacggataccacaaccggaaccgggacgactggtacacaaagtaatactcagaccggtacagatcagacacaaaccggtacactccaataatcttaagacacttcctaaaaagtacgctatcttcttgatatgcgtacttttttgacgttcgcttacgtttagtcttttaatcgccgatatcttaagaaacatgtaacagcgcgctaactattatgtaacatgtttgttactttcagatgctatgctaatcagcgtactaaattaattcaaaattcaaacaacttaaaaaatttttcgaaggagcacaacaaacacatgaaaaaacaaaaaatgacttacttatcttctggaatggttggccttgccggcttagtattgatgggtcttcaaacaaatgatgcccaagctgcaacaaatggtacggttaactacgctgacggggcaacaaccgtttggactagcccagcagtaggtcaaaaacctgctcgttacttggcaactaaccaacaagtaacaatccaagacacaaaacaagtttacggccaaacatggtacaaacttggtaatgacgaatgggtttcaagccaattcattacagccggcgatgcaactgctcaaccagctgcaacaacaaccgctgttaagaacacagtaacagctaacttccaatcaggtgcaacaactgtttgggctgacacaactgctgctcaaccaactggcgaatacttaacatatggcacaactaaaaacgtcattgatcaaaaagatttaaacggcacaacttggtaccaattagaaagcaaaggttggattcctgctagctacgttgttttaaacaaccctaacttggatggtgtcacaccaattacaaatgcacctgcagtgacaccagtcgctgcaacaaccactacaactgaagttcaagcaccagctgctcctcaagcaacaacgccggcacctgctacagaaacaccagcgcctgctgctacaactgaagcaacaacccctgctgctacaacaagtacaccagcagcaacaacacaacctgctcaaacacaaacaacgacaactcaaagcagccaacaaacaactcaagctacaacaactcaacaagcaccacaaacgaatacaacgacaaaagcaagtggtaacgcacaaactgttatcaacgctgctttatcacaaatcggtacaccttacgtattgggaggctcaacacctggtgttggtcttgactgttctggtttagtgcaatatgcatacgcacaagctggcgtttcattgaaacgtgttacaactgctcaagaaggtgctggtcaacgcgtctcacttgataacttacaacctggcgatatcctcttctggggtggcgctggcgcttcatatcacgacgcaatctacatcggtggtggccaatacgtccacgcaccacaacctggcgaatcagttaagaaagcaagtatctcaagctacttcatgccttcattcgcagttcgcgtcctttaatcaaaaatatgtatttaaaaagagccacatcttaggatgtggctctttttttgtggttaaacttagttcaaaatatatttattttccatattaaaagaccatccaaaggctgcttttcaagcgacttttagatggtcttttaacattattttgaaaaaattcattataattatttagctgatttacgttccttcaagaagttcaatacagcagctgtttcagcgttacgttttttagcattgttttggttaacaggacgacggttaccagaaacactaacatgtaagttttgtgacattgcgcgtttcctcctttcgtgcatatattctattattctaatctgaattgacttatttttcaagttaactttattcgtcttttggttttctgaaatagtttaggagccaactggtcagcggaacggttgctatgaccccaatcactccgattaatagtgcgagtccctcaccaattaaaattttatggttcacaattttactaattggataaccgagttgaatgaaccacatcgttaatgacaagaagctaccgaaaaaactaaagaacagtgtattaaaagccgtcgcaataattttttcaccgatcgcgattcccgctttaaagagttgcttggagcccatttgcgcgtcgtattctaagatttcgactaaaccactggcaactgcaatactcgtttcggcgattgcccctaagctgcccagaatgatcatcatgatactaattttttggaacgacaagccgattgcgagtccaaagccttcaatctcttctgcatcttccgcaccaaagccgtaggtagctgctaactggctgaggggcacaataatgatcagcaagcccaccaccacgattaacgacgtcacaaacgccgtcttggccgttaatggctgcttggtattcatgaagatggatgtcgctaacaaaatcagactcaacagaccactcacaatcagcggttcaaacccacccgccaccaagaccagtgccaatataatcacgacaaaattcaaaccaaggctgaagaaaatcgtcagcccttgcaaaccacaaaccaacactaataagatcagtaaaattcccgttagcaacatcataggcgtctcacccgcactaactggcttgccaacaagctcgttactggcaccgccaaagtaatcccaatcgcactaatcaccgtctgcgtaaaacttaacgtgacagttcgcgataaggtatacgcaattgtgttgccattgcgtagatacaataaaataattggaaaagcatccgccatgactaaaaagaacaacacattaactaacggaccaataatttcgcgaccaattgcgagtcctgatttaaacaattcagtcttcgtaacgtttggccgttcaatcgctaattgctggagtgacgatgaaatatcggtcgtctcatccatcacagcgcctaaaatcccgagcacgacttccgctaagaagaccgttttatacggctgtaattcataggccatcgtttcataatgcaaaccttgatcgccggttaatttcaagacggccatgctgagaaacagtgctaggaacgttgcgccaattgtcgcgccatatgagacaagcatctggcggttgggtcctaatactaaaagtagcgttaaacccgttagaacgaccgctaagccacacataatcggcaataaccaccgtccacccgtcatcgcgtttaaatggagtgttaagacgaatgcgacgagattgaccaagacactgattagcgtcatcaatccgcgcttgagcatcattagtaataggaaactaaacgtcaacagtgttaagccaacgatgattgtatcgcgcttaggctcgtttaaggtccactttttcaaatattgatcacggtgtaaaaagacttgttgtcctttatagtaccgcgtcgacatcgcttgcgacgccgtatacgtattgcgcagcgtaatcacttgccctttttgcttagtgttcaaaaattggcccgtgacccgctggactacttctgtatcttcattttggtactcatcagtctgtttctcacggctaattgtctggacccgcgttacccgaataatcggttgctgatacaaaccagcatcgaaatacgtccctaatacaccgaggacgcagatgacacttcctattagaccaatccacagccgtttatgttttaccacagtcgtcacctctgttttattctagcgtttctgcgggtgaacgtcagctttttgaggctgatttaatcattatttaagcgactattgaaaatcccatacgtaaagtagaccactaagccgatgacaaaccagattgccgctgcaatccaagtgacttttggcaattcaaacatcatcaataaacatagcgctcctgatattaacggtaaaactgggtaaaatgggactttaaacccatttttattcggaatgtccttgcgcttccgcaatgggatgaccccaatcgacatccagaaaaaagccaccaatgtgccgatgtttaccaaattagtcaattgatccagtgaaacgaacccgcctagaatcatgatgactatcgtcacaattttgatactgttagttggggtttgatgttttgcagtcactttaccaagtgcttttggtaataagccatcacgaccaattgaatagatgaggcgggaactgctgtaagtcatcgtcaacatcatcgtgaacatccctgctaatgcgccgagtgaaatcagaccggcaaaccaattttgatggacgacttgtagcgcgaatgtgaccggattagcaacgtccaattcgcggtacgacaccatccctgtgaggacaaacgccactaatatataaagcaacgtacagatgattaacgtcccaataatcccgataggaagatttttttgtggattcttaacctctgccgccgatgctgacacacagtcaaagccaaggtaagcaaagaagacgagtgatgcccctttgaaaatcccacttaccccaaacggcatgaacggttgccagttagtgggtttcacgtagaaaatcccgacaccaatgaaaagtagcactacgcctaatttaatcaaaaccatgatattattaattcgtgttgatgaacgagtccctcgcattaataatgtcgcaatcaagcccactaccagcatcgcaaacaggttcacataagtgccatgtgccggatcaaacgggccagtaattgcatgcggaatatggatgccaaacccttcgataaatgatacaaaataagccgaccaaccagttgaaactgccgcaactgacaacatatactccaagaataaagcccagccaagcagccaaccgattaactcaccaaaaataatattgccatatgagtaagcacttcccgcaactggtaatgccgatgaaaattcggcgtaacacatcgccgcaacggcacaaacgaccgccgcaatcataaatgaaatcgtgattgccgggccactatgtaacgccgcaatcgttcccggtaagataaaaatcccggtcccaatcactgcccccacgcccaatgcaattaaatccttagccgttaatgttttggccaaccgctgatcttgttgtaaataacgttccagtgattctttgcgtaacatctttgccattaatcccattttaaccactcctatttttattgtatgcactcgactaggcgattactcgccgcctaccaggcttcgtcgcacttctttaacgtgctccttgaactgccttctgcgcttaactacagaatcacaatggtggtcgtacgcccaccattgcgctttttaggttatgctcgaagccaaatcgttcaagtcgcacttctttcttaacgtgctcctcagccagatacttccgtatagctacgtccagtaaacaaagctacaacccagctttattcactggactatgctattactcagtatctaaccaggcttcgtcgcactcatttaataacaaaaaaaggagcccactagtcttcactagtgagctccaccaggaagatgactcggggttacccagccatcttccaattcattaaggtttgtcatttcaactcaaatgccttctccttaatcaaccagtcgattactgggtatcttaaagaaaaagctaaaggcaacacgttgcattgaattcatgacagaccctccttgttattaattagttacttagtataggggataaccatttatttgtaaaggattattttaaaagttgttttctaaaaataatctgctagaatcaaatttaacttattcaatggatgtgactggcattgaaaatcgcatgctatttttctgacaactcgattggtacgaactgttcatgcacgtgcgtgaaccgtttatttccgattgccgttagagattgcttgcgttaattttcaggtcagttacctaaagacttgttaaaagacgctgttattgcgtctttttttgtgcatttttaacgacaactgggccaatctcattcaatcaatgaggtgataattcatgggcacaattcaattcaaagcactcacatttaactattcagatcaaacacaaccgttgttcgatcacgtcacgcttcaattcgacgccagttggaaactcggtttaatcgggcgcaatggtcgcggtaaaacaacgttattaaaattacttcaacaccaactaccatttgatggccagttggttaccaatctcgattttcaatatttcccacagactgttacagaacctacgcaactcacacgcgatattctaatgcagctaggtaacctcgacaattcaaccttctggcaagtcgagcgggaactgcggctcctacaagtcgcacccgaaatcgtctggcaaccatttgcttcgttaagtcctggtgaacaaaccaaaatgttactcgccttactattcatcgacgactatcattttcaactgatcgacgaaccaaccaatcacctggatcaagaaggccgccaagtcgttgccaattatttacgccaaaaagccggcttcattgtcgtcagccatgaccgccatttcttaaaccaagtgatcgaccatatcctagcgattaatcgtgccgacatcaccgttcaccaaggcaactaccaaacttggcaaaccgcccacgaccaacaagctgcttatgagcaacaacagaatcaacaactcaagggcgatatcaaacggctgacaaaaacagcacaacaaaaagcgcagtggtcccacgaagctgaaaaagggaaaaacgccgccagtgtcaaaactgaaagtgccaatctcgataaaggcttcatcggtcatcgcgctgctaaggttatgaaacgggcgacgacaattgccaaccgcgcggaagaagcaatcgaagcaaaacaacaactttttaaaaacgttgaaattgctgcaccactgaccatcaatcagcgacccctcaaacccggtcaaaatgtgcttagtgttgatgaacttgtcttacaacaagacggcgtcatccttaatcaaccactctcattcaccttagaagctggtcaacaggtcaccctaactgggattaatggcgcaggtaaatcaacactgattaaggcgttacttgcattacccgcaactgaccacattaccagcagtagtctgcaccttaatccgcacttaaccctctcgtatcttccacaagatttcgatcaactgagcggctcactggccgacttcgctgctgcgaaacaggttgatcacgaacaactgctaagcatgttacgcaaactgggttttgaccgcgatttatttacccaccgtctagaaacgatgagcatgggacaaaaacgtaaagctgcactggcacgttcgctctgtgaagaggctgactgttacctctgggatgaaccgttgaattacctcgacgtcatcacgcgtgaacaagttcaaactctaattgccgagcaacgcccaaccctcctatttatcgagcatgatgttgatttcgttaacgccatcgccacccaaacctacgcacttcaaccacaacactaatccgtattatttgtataccgtgtcacgttatatccgcgcacgttgaagtaagtcgttggcgactcatcatcaaaaaaggccgggttcatatcattaagtcgcgtttcggtattggttaacgtttgttccggcagtgctaaattttcacggagccgattcgaagcagcctgcaaatcttccgtactaatgatttgataggtactgccgttaagccacgccgttttacctagcaattggctgctgacaatttcaccactactttgatgatagttgcgaatcaactgcttcacttggtcggctgtaaaatcagtgctaattttctgaccaagcttagtcattaagtcaccaatgttcatcaaatattttggcttttgaattttttgcgcaacttgtttcaaaacttcttgttgccgcaattgccacccatagtccccgcgcggatcttgataacgcatccgactataagcaagcgcctgatcaccattgagatgatggtggccttgtggaatcacttgtccattcaaattaacgtcaatcaccgtatcgatggtaatccccccgacaaaatcaaccaattctttgagtgcgcccatatcgaccgtcaccgagtagtcaatcgggagccctaaaaactgactgactgtttttttcgccatcttagccttgccaatttcataagccgcattaattttctgaatattaccgccgtggtcatctgccatctctgccaatgaatcacgcggaatagagtagaccaccgttgcttcttacgccgggttaagtgttacaaccatcatcgaatccgacagaccacgatcaacgcgcccatccgcgcctgtgtcaacgcctaataataggaacgagattggctttcgctgatcaatttgttttgaaattcgactagacccggttttaatcgcatcaacagctttatcctcttgatgcaaataaaaacctagcgccgccagactaatcacaacaatactactgattacaatcacgatactgatctttttcacagtcaattcccctttgtttaaacgcccaccgcatccttttttagatatgaaccaataaatgctgtcccccttttgaatcgttcgattctggcggacagcattttattttaacctttgctttaaccgacgtaagccaactagcatgaccggcgctaagtgcgaccgattaagccatcgtagccaccgggatgtgccggttggtaaaccacgttctaaattgatcaattgcgtctgaatgaattgtcgctcaggaacagtcagtgtgcgctgatcaaaaacaattaacattctaaaaaaggtccgcacatactgctttaaaaatcgtgtgtaagctgcgcgatccacttctgcaattccagccactaattgcgtctcaatgatgtgcagagctgttaagttaactgagaaccactgcggctttagggtactcgtagccgcctcagcatgccctatctcgtaaacatataaaaacgctgcccgatgcctaacaactcggcaatgttgtaaatactgcaagttgaaaattaaatcctcaccgatacgcagcgattcatcgaaccgcaatgcttcagcttcaataatcgctcttcgatacaatttattacatgattgaaagaagacattttgataatagtagtctaaaaaagcccttttgccgtcttgtattgatagtcaccatcttcagtcaaaccaaaagcagaatccgttccgccggctctttcgattttagttctgaatagcacccaatctaccgactgaccgacgactggttcaaataattgggcactgttaaccaagaagtcatcggcattctcagcatcaagttaagcccataaactaatcagtcataaaacggctgcatcaaaattacttttgatgcagcctctggttcaagcatagactaactacgctttgtttgttattaatctaatttccgttccaactcactaacgatttcagcatgttttgcttccgttaatttaatcttagccatgaagattaacgctgaaataaccaataacgccattggaatgaagaacatgtacattttgaattgcaacaaccccgcgttagtgatatcgcttggtttcgcattcccagtcatgccagcatgaatcgcagccgtcacaacgacgccgtttgcaaaagccccggctagtttatccaataaaggtcgcactgccaatgttacagattcattccgtgtaccacttttcaattgtccgtattcaacactatcggtaatcgtcatcaaagcagccaaaaagaccagtggatatgggaagaagaataagccgaccgcaattaagactacgaccaagttacttccagcaaacaagaagaggatataaccaagcatcatcattgcgattccgccaatatagattgcccggcgatgaattaaagcaaccaatgttgggaacaacgcaactgacacaatccctaagatggcagtaatcacaccaaccgttgagaacgctgcggcgcggcccatgacatatctaaaataatataaaagcagtgagttcgtaatcacataactaaaggcaaataagaaatatgaaagagataaccacattaattggtcatttttaccaatcacactgaaaacgtcacgtaaccgaaccttttcagtattttcccgaatagcactcttttcttctttggttcctaagatggtcgctaaagcgcctaagaatgaaacaaggccaatgacaacggcaaaaccgaaccacccggcactggtttgttcattcccatgactcccagaaaatagttgcgagaagaaaaccaccattggcacaatcacgataatgaccccttgtgcacctaaagtggatccgaaacgcgcaatcgccccgaattttgtccgtttttcagaatcaacactcaacgctggcaacattgaccagaacgagatatctttaaacgagtagaagatatctaaaatgacgaaaacgattgcaaaaagaactaagtaaagataagggctacttgtcgcaagccctccaaagttggtaaaaatcatggccaagccaacagagctaataattgaccccgccagtaaccacggcttaaatttcccccaacgcgtccgtgtattatcaaccactccaccaatcagcggatcgaaggcaatttcaacaatccgaatgaccatcattgtataagtgacatacgcaatcatttttgaattaaagcctgcatttttggtatcgaataattgactcgtgacgaacatcataaaataagtgctaagtgttgcataaaaggcgtcatgcccaaaggccccaaaagcgtaagaactatactgtttaacatcttttagttttttcatttctttagattcctttcgatagtttcttcattgtaaacatgctttcatcaagcacaaccctcgggttatcccgcttgatgacgcactctagtgatagcgatgttcgataattttttccaaaatcgcttggcgttgcttttctttggctgagccgaattggttttcttccaatgaattaaaatcgttggcgagtaaaactgattctagatataacgtcaattgacgcttgatataaaccttattatcttcattcgtttgcttgggattcccagcaataatcgctgcagcaaattggtctggatcgataataattttgttgtcgttcatcctagtcgcttctttctcttttagttagtaaacgtttactatttacaccatacaaataaatcaatctgtacaagagtcatcctgtaaacgcattctttcagattgaaatcttattttactaaatttttagtaaaatgtaaacggttattcgaaaacgttacctcttgttgatttacccaaaacaaaaaggctactcctaagagcaacctttttatcaattcatttatttagtctgaaatttaaattttgtccacggttgaagcatttctaataaatctaattcctccggtttaattcgtcccactttatttttgcggctatcttgatgcgattcaaggacaatctgaacctcatttttgtaaatcccaaactgatcattacctatcacaatatcaccaatttggaacgtttcctccgaatcatgtggcgcgttaggcgttgttttataaatcacacgagattgtgttgaacgagcgactaatgcattactatcccctcttctgaagtgttgcattccaaacaatatttccctttcaaccggtgcaatctctggcatcaactctggtgtaaaagctaattgataacgattaaccgctgctaaactttgcaattcagcctcactcgcgtaagcattaccgataatgacatcatcaatcaaccccgttgcaaatagccatttagcttgagcttcaattggtaaataacggtccttttcaagtgttggtaaaccatcatttacattccatggtccctgatcaccgttttgacttgcaataaatgcggcagtgtgaataccatgctttttaaatcgctcactacatgcaagaaagaacgggactgttaacccagttcccacttgtggataaaaattatgacacccaaaaatgtatggttcgtttgcttgataacttaaaatgttatccaaataggcaacattgttactcatattcaactcaataattaaatgatatggattataactaataagggcttctgtactcccatcaaatccttgatctagtcggatcccatcaacacctaattcagcaaaaaaaccgagttcctgatagctaatccctaattgatcaaaaatacgtggtgaaatatcaatcattgtttgataacccaaatctttcgcaacttggataatatgttgatattttgctttcgtttctgcaatatcaccaacctctaacatactcatgaatagacgagaaaaaccatattggcatcctaattttaaatacgcttcgtcttcttgtggaatgctgtgatcaggataaatggataaacctagttgccgaaaagtcatttgaaatcctccagaataaaattttttacaccagccgcattactgccctcaagtgttacaaattgaaccgtgctcttttgagccacttgttcctctacatggtgctttaataattgattatgcgtcaaaactgagccggttaaagcgattttgattggtttatcagttaaaaaacgctcccgcattaattgaatttgttgcgctaactgattagcacatacctcaattacacttttaaactgttcattattttgaccttgttccgctaatattcgagcttgtgcagcaatttgctgccgtgacatttgataaaaatcactaatcgcttccgttggtgatacataatttaaagccgttaggattaacgttgtcatcggtccagtttctaactgctgattcaattcctgtgtcatctgttgatagcaacgtttgacaatgtcatatgcaccaccttcatcgcctaatagatgcccccagccaccaatccgatatcgtttgggaccttcttgtcctaaaacaattgaacccgttcctgcaatcactaatatgccggaattgtacccaaatcctttcaacattgctaaatcagcatctgaaattattcttacaggtattgagaatcggttcagtaaatatgcttctattgctgtttgattatttgcactctgactacctgcaacgcccgctaaaatcaattggcattcatgcactttattttgattaagtaacgtttcaataactgtttctaaattaacaaaagtctgttcgtagtttaataagctattacctggtccagcacttgctgttcctagtaacgtcccatcctctgcccaagcctctgcttccacatgggtgccaccactatctatcccaattcgatattgcataataagtatctcctttcagagcttgactaatttcatgaatacggatacattataaccagacggaaattttatttcaactttttatataatttgaatttatatttcataacaaaggtggtccttactatcgcactaatgactcttaaatataacgacacgatacttgacaatcaaacaacaatcacgattatgctaccggataaaattaccggaccattgcaatcgctctatgtccttcatgggctaggtgatgatggtagtgcttggcaacgaaaaacttaccttgaaacattagttgccgattatcaggtagcggctatcatcccttctcttcctcgtagttggtacattgatcaaccagatggacaagcttgtttctcatttttgacgcatagtttgcctacctacctcagccaactattaccattatctccggaaccccaagatcatttcattatgggtaattctatgggcggctttggaaccctcaaatggctcaacacatatcctgatttttttcaagctgcagtcgtcctatctcccctagttgacttggaaatcgtaccatcattgatgccggattatcgtcatgttttcttagatgaacctttaactaattatcaattaacaaaaccatttaagttaactcaaacacctatttattggacgattgggactgatgactttttatttcaacaaaatcaacattttctagacaaagtgtctttaaaccccgctagtaaagttatctttagcccaggtcgacatgactggctattttggaaccaagcactaaaccaagcactcgcttggttacccttaaaaaaataatggagtgattataatgtattcaacaaccgaacaacgtaatccagaaacacttaaaatagatcagctcgatacacttgatgtcttgagcctaattaatcaacaagatcaaagtgtgccctacgcaatcaatcagcctgaattattggaacaaatgagtacgattgtcgtagaaatgaccactacctttaaaaatggtgggcgcattttttatatcggtgctggtactagtggccgtttaggtgttctagatgctgttgaaattgtaccaacttatggcgtttcacctgatcgtttcgtcccacttatggctggtggtaaacaagcaatgtacgaagctgttgaaggtgcagaagacaatgctgatttagctgtccaagatcttaaaaaccagcatttccaacctggtgacttcttaattggtatcgctgctagtggacgaaccccctacgtcattggtggtttagattacgcccattctttaggtgttaaaacagcttcaattgcttgcaataaagatgcactcattagccagcatgccgatttaccacttgaaattatcgttggtccagaagtcgttaccggttctactcgaatgaaagcaggaactgctcaaaagctagtgctcaatatgctttcaacaaccacaatgattaaatgtggaaaagtttacggcaatctcatggtagacttaaaaccaacaaatcaaaaattaaaaatccgtgcaaagtcaattattcaagaagcaacaggtacaacagctgctgttgcagaaaaagcatacttcgaagcacacgaatctgcaaaagttgcaattgtgatgctgagcgcaactgttgattatcaatcagcagttactgctttaataaacaatgatgaccgcgtagcactcgctatcgctgcactcttaaagaaatgagagacaactatgcctattattgccaaaatcaagaaacattacagccttttctcaagtgctgaaaaaaaagtcgctagctatatcatgaatcaaccggattccgttctacagatgactgtgcagcaattagcttcagaatctgaaactagcgctgccaccgtcattcgactcggaaaaaaaattaatgtggatggttttaccccccttaaaattgaattagctgctgacttaacacaaaccacaaatacttttcatccagatattacaaaaggagaacaagttaattcaattaaagacaagctcctttataatgctcaaacctcattgaatgaaacagttcttcaactcgatgaccagcaattacaaatgattagtagaaaattatcaaaggttagaaatttaatcgttttcgggattggcgcctcctacttaactgcactaaacattgctcaaaaatggggacgaatcgggattgccgtcacaccatttaatgatttggatggtttacttcccttattagtaaacgccaatcagaatgatttaatttggatcatttctaactctggtgagtcatcagatgccattcaagttggaaaaattgctaatcaagttggcgtccccattctatctcttactcaatcagggaataatagtgtttctaaattaagtacgatagctgttcacacaagtcaaccaattgagtttccagatcgaattgccgcgaccaattccctacttgtgcaatttactgttgttgatattattttttatgaatatgtcagccataactacgatcaaagtattgaacgactcggtaaatcagcagaaattatcaaaacaacacaaaagaaatctctgaaataatatttcattatcttttttaattttatatattgaaatattatttccatgtgctaatataatggtaagcgctttaaataaaatcttggaggtttaaccatggaaaaatttatgaaatgggttgaggaaaaactcgtcccgcctatggctaaagtcggtacacaacgacatttattagccattagaaatggggttgtctcaactttatcactaatcttaattggtagtttcttcttaatttttgttaacattccgtataaaccattagccgatttactaacaccctacgctgctacaattgctctaccatttagaatgacgatgggtttaatggcaatctacgcaaccttcgtaatgggatctgacttggcaaaatcatataagttagactcaactactggtgggattttatcccttggtgcgttcttcatgctacaaatgcccgttaacgttcttacacctaaagacaaaccactcggctttgttttaccaatggggagcttgggtgctagtggaatgtttactgggattttagcaatgatttttgctgtagaggtttatcgcttcttctccgttcataaaattacaatcaagatgcctgaacaagttccacctgctgtcgcacgttctttcgaagcacttattcctggcgcaactatcttagtgacattatggattattcgcgacattgcaggctttgatgtaaataatgctttactcgcattattcaaaccagtcaccggcgtacttggtaacaacttgtttggtgctttactcccaatgttcttaattcatattctatggtcatttgggattcacggaatgagtattgttggttccgttgttcgcccaatgtggctcatcatgctcgacgataatgcaaaagcattggcaacgggtacatcagcaacgcatcttccttacgtgacacccgaacaattctaccaatggactgttacaattggtggcgctggcgctacaatcgttgtagctgtactcttcatcacaatttgcaaatcaaaattcctgcgtgaagttggacgattctcaatcattcctggaattttcaatattaacgaaccaatgattttcggggcacccatgattcttaacccatacctcttcattccattcaatgttgtaccacttgttttaacaaccgtttcatacaccgcaattaaattacatcttgtgaatggcttttcaacattccaagcttggacattacccgcaccaatcggtggtttccttagtgctgggaatgactggcggattgttgttttaattgccgttaaccttgtcattgcaactatcatttactacccattcatcaaggcgtatgataaaaaaatggttgcagatgaatctaaagcagcggcagaagctgcataaaaggagaactcagcatgctctattggattttaatatttttaggttttctaatactcttaattggttgccaatacctattaaaatttttaaatcagcacggaattttaattaaccgttggatttggggcttgctctcctttttaattttaattgtcccacatgttatttggtcccatattccaactggaattgatggtattctatacgctttatgtgctgtttttgccattaatttcatgattgaacaacatgcttatgttcagcaattaaatcaataattataatatagaaaagccccgctcatctgagcggggcttttctatattatttggctaagactgtcatttgattattataacgtgcttgattatcaaactgcatcaatactttagccgctagatcttgcgttgcaaaaactaatctttcaactggcatatttgccacgttgtaagccaccatgtgtgaaaaataaacaaactgtaacatactgctgtatgccgaaacatcgccttgtttcacaatttttttaacgaaaaaattaacgatatgatcgccaaaacgaacataacctggaatcgaaatcagttgtacgttgaactgtttagcagcccacacacgattggccgcgttatctggcgcgtaaatgaccgttgtccctgtcgtctggtctgttggttgcattgtaattaaagctgtttttgacattaatggatactcctcttaagtgatgataaggtccattgtaccagagattaccgtttattttagtaattctagaaaacggttctgccaaacgttttcgtaaaaggcaattgtctgttcagccgtcatataggcgttgtccgttgtagttgaaagaccagctaccatttggagttggtagctcaaatggtgggcaactttaatcgttttatcaacgcagtattcggtttgtgcaccacaaatttcaagcgatttgatttgcatttggctcaataacgtttgtaagtttgtctgccaaaatgaatccgcatgcgttttttgaacaaagattgccgttttaggcacattcaattctggcattatctaccaagtcgactgaccagcaattaaagtcttatcgttatgttggacaaaaataatcgggcgactttccgcctgataggcatcaattctggcattaacgcctttaattaattgattaagacgcgcaacaggctgctcacttttgcagacaccattttggagatcaatcactaataaacaatcggctaacttcagcattagtcccctctttcctttaaatcaaatcgagtatatcattatttaactaaacctcatattttgtctgacgatattaaaaggaagagatgcggattacccccacctcttctttttcaatgtctccgatgtttttcccgcttcttaatctggtgttgctgaaaacggctgtattgtatggccttcttttcggcatgttgttcagccctattagttgcatgttgtgctttacgttgacgacccatccgaatctttttgttgataccaacgaattgaataccaatgataactgacttggcaccctcaaccacttgcatttaaacaattccttcacatgattatcgctcaatcccccactttcccgccaaaagcgttatactatggataataaataaaaggagtgttttgacatgcaaaaaccaattaaagggtcatgtaccacggtcttagtcggcaaaaaagcttccatcgacggttcaaccatgatttctagaaatgatgatggccacgaagctttggatccacaacgctttgttgtggtcaatcctgaagaccaaccccgagattatcaagcggtgattagcggcgttcaaatccaattgcctgataacccaatgcgctatacctcaattcctaactcattattgacgaacgggatttggccagctgctgggattaacagtgaaaacatcacgatgtctgccacagaaacgattaccactaacccccggattcaagggcttgatccttttgtccctggtggcatcggtgaagaagatattgtgacattagtcttgccttacatccacagtgctcaagaaggggtcgaacgtttaggcgccctccttgaagaattcggcacatacgaaccaaacgggattgccttttctgacaaagacagtgtttggtggcttgaaacaatcggtggtcatcactgggctgctgttcgcatccctgatgatgcatacgtggttgcccctaaccggatgaacatcgatcatttcgactttgattcagccgacacgctttgctcagctgatttaaaaacattaattgatgacaaccacttaaatcctgactttgaaggctacaatctccgtcatattttcggcagtgcttcaatcaaagatacggtttataacaacccacggacatggtacggtcaacaatacttcaatcctgaaatcaaacaagatccaatggaccaagatttaccattcatctgccatgccaaccgcaagatttcaatcgaagacgtcaagttcgtcttgagcgctcattttgaaaatacagaatacgatccttacggtagcgcccctgaagatgttaaaactcgtttccggccaatcggaattaaccgaaaccacaacgtgcatattttacaagtgcgcaacaacgtgcctgctgaaattgccggtattcaatggttagcttatggtgccaatacatttaacaccgtcgtgccattctacacgaatatcaacgacacaccagaatcatacaagaatgccacaggtacttttgacttgaacaacatgtactggttaagttgtacaaccgccctacttggcgatacagattacgacttctacgttgatatgcgtaacaccttcgaactcgaagcaatgagtgcctatcatgtgatccaaaacgaaaccgacaaggccttcgctgatcaaaaagacgttgcagccttcttggaagccgctaataacaaactagctagcgaatcacttaaacgccaaacagccctacttggtcaaatggtgatttcaggttcagaacatatgaaattacgctataacttgaacgactaataaatatttaattcaaaaaaagagcgtctcagctattcgttagttgaaacgctcttttttgagttgtcctcttttttcagtagcgtataataactactattactcaaaccacactaaggagtcatttatcttttgaaaccccaaaaattaaaactatcggattacttactcggctttggattcgtattattgatggtcggcactgccactgtcttgaacgatgttgagattattctacccgaaatcgcagccttaacaacggggctgtggatttatcacgaaccgggttggctcaatcaacccgccaagatattttggctgccatcgataaccgccatcgttgggtttggcattaatcggttgccgctcagttatgcagttaaaattagcttactactactcatcatgattgttttactttgtttatttcgctcaacactcgcaccatcgtttgcaacggggctgttaccgattatcgtcaacgccactgaactttcattcatcattgcaattttaggctttacgctcactttgatgttggtcgttagcctccgcaaattgcatctgcaacatccctatcatgccacgattaactatcgcgtcatgctggtttttctaatcattgcactcttatgggtgttagttgttagtttactcggccggccacagatggctgccattccgccggtacttgtcgtcttttttgaaattctacaaaaaccaatgtatccaggtaaaatggccatcaagcagatggttgcattaactggcgccgccacaatcggattcgtcgcttatagcttacttgattcacggttattggtaaccttaattgcactgccactagtttgggcattactctatctgctacaagtcagaattcccgccgcctacgccttccctttattggccattattctcccacaccaaatgtttcaaagtttgccgctcgtcactttactggcaactagttacttttttggggctgcttatttataccagcaatacattaagccgcgtctcatcagcagataacatgacggtttacgactaatgagggccaaacgtgggcggataatcaacattcgcaaactgctggtcaacgcggtcccgttttaattcaggattatcaattgctcgaaaaactcgcgcattttaatcgtgaacggattccagaacgggtcgtgcatgctaaaggcgccggtgctaaaggttacttccaactcactaaggatatgagcgcctacacaaaggcagccattttcagtggtgctggtaagaaaacaccaatgattgcgcgcttctcacaagtagctggtgaagccggctatcccgatacttatcgtgatgtgcgtggatttgcccttaagttctataccgaagaaggcaactatgacattgttggtaataatacgcccgttttctttgttaatgatcctctgaaattccctgatttcattcactcccaaaaacgagatccacgaacacacgcgagaagccaagacatgcagtgggatttctggtcactttcacctgaatcagtccatcaggtgacgattttaatgagtgatcgcgggattcccgctagctatcggatgatgcatggctacggtagtcatacctttaaatgggtgaatgctgctggtgagcagttctgggtaaaataccacttcaagacaaaccaaggcgtccataacttaagtaacgaactggctgccgaattggctggtaaagatacagattatctacaaaatgatttattcgatgcgattgaaacaggcgaccatccaagttggaccgttgccgttcaacttgttccttatgaagctggtttaaactatccgcaagatatctttgatgtgacgaaggtcatttcacaaaaggattaccccttaatcgaaatcggtcaaatggtactcgatgaaaatccaaccaacaactttgaggatatcgaagaattggcttgctcacctgctaacttagttcctgggattgaagcttcccctgacaaactcctccagggacggttgttcggttataaagatgctgaacgttaccgtctaggtgccaactatgaacaattacctgttaaccggccaaaagtgcccgtgcataattacgaacgcgacgggatcatggcacaaaaccaagagacaggcgtcaactatgaacctaatagtgaagatggtccaaaagaagtcccatctgccaaaattcatggcgaccaacttagcggtcaaaccggtaactatcctgccgatcccgattactattcagcagccgataagctttacaacttactaactgatgaagaacaagatcgactaatcgaaaacattcgcttaaatctcggccaagttacaaaacctgaaattcaaatccgcgaagtcaaacaattctaccaagcggatccagaatacggtcgccgagtcgcaacagtattaaatttagatttaaaccaatttgaacactaatctatacaaaaagaaggtatccggcccaccggataccttctttttatttatcttcttttggagaatcttgttttgctgcccattctttcttggtcatcaagtcagagacattcattttaatcttcgtcacgtttaaaccagtcatttgatgtactgatttagcgatgcgttcaattgtttgttcgaagatgtctggcgctgatttaccgtattccaagatggcatccaattcaatcgttacttcttggttatcaatatcagcgtcgacgccctttgtcggatcttcttggtctctgaaacgatcagctaattgactcatcatcccgcctgataattctaagacgccatcgatgtcatgcaccgtttggcccgcaattttttcaatcacaccatccgagaagttcaattctttttcgattttttcggtatgttgatccattgtcttatccatcattttatccattggtttgtttggtttatccatcgttttcatcatcctttactatttttattgaacgcgtttttcagaatcacttttctttggattactgccttgttgttgccattctttcttagtcataatgtcactgacatggctgttaacttcgacaacactcaaaccggtcattgattcgacagcttcagtcactgcagctgttaatcgttcgaaaacatcccgtgcattccggccgtattccaaaataatggtcatgtcgattgcgacctgtttttcgccaacttccacactgatgcccttcgttggatcactatcgtttctaaaacgatccgcaatatcactgaagaaattaccgttcatcgataataagccatcaatgttttgcgctgtcttaccagcaattttggcgattacagcatcttcaaaagtcaatttgctattggccatcacttcatctaaatgtgcttgttctaccattttgtcacacctccgttatttatcctgcttcaagacccggttaacttgtgatctaaatccttctagatcttccttagaccctgttaaactagctgcaatgtagccgagtaaaccagcgatgataatcaagattaaattcataaatccaaaactaatccaaatggctgccaacactgccccaacaacaaagccccaataagaacgtctcatttgtctcacctcacatcactttttgcctgattacttagcggtgatagtttgacattcactgctttaatcggcatctcaaagattgtttgtaatgcttgctgtaccgtttctttaactgcccgtgcttgttgatcgagatcgttgcgatccactgcgaccgcttgaacgtcggcagtcacttttggatgtcggcctttaaacgtcgtatggactaacacttccttaacacggtgtttttcaataatagcttgtgtcactgttttttcaaccgctttgcgggaaagtgctagttcacctttatcggtcttgatgatcatttggcgttttttcggtggactgaataatgccaatagcagtaaatataagaaaattaagccgctaagcactcctaatccaagtccaaaattaccgacccattgttcgggtagccaactaagatgcataaattgcttattggattgttgtagtggatagattaatgtgataaaccacgctacctgacacaacccaagcaaactggctaaactgatcaccactttagttaatttattcatggtgtccgcccctttgtattaggattttctacgtgtgaataataatgaaacaacgaaaacgacaatcacggcaccgataatggatggaattaaggccatcccggcaagctgtggtccccagctgccaaacaatgattggcctagccaggcgccgactaacccaccgacgatattgccgatccaacctgcaggtaaatcacgacttgtcaatgcccccgcaatcaccccaattaaagcgccaataattaaaacccataaccaatgtaacataacaatcatcctttcttgtttccttaaaatatattgctggttctccataaatgtaacaaattcaaccagcatccgtaaaacaatacgcttatcaatattattaaattatcgtaaatgcacttgtctaattaattgattcgccaccggtaacgccgtaaatttgaccggtaatatagcttgctgcgttgcttgctaaaaaaacatatagcggtgctaattccgccggttggccggctctttctagcaatgtattctgcccaaacttaggcaaagccccttccagttgtccttgagccaactgcaacggtgtccaaatcggacctggtgcaaccccgttgacccgaatacctttatccgctaattgttgcgctagattgatcgtaaaattcttgattgctgcttttgttgctgcataatctaacaaatgcggactcggattaaaggcttgcactgaagtggtcgtcagaatactgccgccagccggtaattgagacaatgctgcttgcacaagcgcatacatcgcaaccacattaacgttaaaactatcttgaacttgttctattggtaattcggtaattgatggatgcgcaatttgttgagctgcgtttaagactaatgtgtcaagtgtgccaatttgctgctgcgcggtttccactacttggctagcaatctgtggtttccgaaaatcagctggaatcaatgcgattttacgccctgcatctcgcaccaattgagccacttcttgtgcatccacttcttcacctggcaaatattgcaatgcaatgtctgctccttctcgggcaaacgcaattgcaactgcacgaccgataccagaatctcctccggtaagcagcaccttacgatctagtaaccgttgtgcaccacgatagtgttcttcgccacaatctggcttgggatgcatttgatcttgcaatgccggactagcttgttcttgttcttgaaatggctctgtccgataaagtgttcgcggatcttttaaatctggtttacccatcttcttgttccctcttttccaattaatctagatacactgcttttaaatgttcaatgtcctgcgttgttaatcctaaggcctgttgtaaataggcttgagttgaaccataatcctcattgattatgcgctcagctgcgtttaagtaggactgatcaacactcattaatgcatgcatactttttaaaaagccgctcgaggcatctttttgacgtagcgccttaatgcgggctgcaacgtgttccctagatgctgtattcgataatagataatcatattggatcacatcttcaggtaccccgagcgcatttaataaataataagccgccattccggtacggtctttgccacctgtacagtgaaataaaactgcttgttgcggatcggcttcagtcaataatcgttcgaagaattggcgatacattccgattgaatagggattttgcaccatttctcgatagacttggcgcatttgttgctgcccaccaagcggattattggtgtagcgctcataaagttccgcttcactcgccgtactttgcgtcgcatcttctttaaaaattggcaacaattcgtaagctgccgtcgtaatctttttatctggcgcttttttacgctccatcggtgaacgaaaatccacgacataggtgatatggtagctttccaagagcaccaattctctcttactaagattcgccagattccccgttctgaataatcgatgcggtttaatcgagcgaccatccagtgtttgatagccacctagttctctgaaattgtagccatttttaattggtaatatgcgcgaaaccatcgactcatcctctctaatcaaccactttggctgctaggatcattgattatcatccaatttttgaagacacctttttaccgtcttgttactaaaaacacgaccatgatgatcaaattccaatggcccccagctctcaccgacgagggcctcaccgttattctctcttaaaattgcttcctccaaatcagtcataccttctagaaaacactttagattggctgattctttcttaatcaccaagcacaattctggggtcttgactgtactacgacctaacctaactttcctaattgggacttctttttgcataagcaaccttcctttcatgaaatttttaataacgctacaccatcaatataaaataatcacatttattgatgcaacttttatgattacgttttgttattgttagcataatcatttacctttacaaagattgttgaagttgtttaaataaagacacaacacctaaaaggagatggttattatcaacgctattaatatcatgtttgccgcagatgaaaactatggtgatcaacttttaatcgccataaagtcggttctaacccatatttcgcccaaaactactattaatttttttattctcgataatgaactcactccgcaaacgaaacacgctgtttccaagcgcgtcccacgacccaatcaagttgagtttattgcacttaataagcagctttttgaaaactgtcctgaaagcaaccacatcaacaaaacggcttactaccgtattttagcgccaacccttttgttgcgggaaaagatcgaacgtgtcttatatttagatgtcgatattctcgtacaaactgatctcacgccgctatataatacgcctttgggcacaaatatcgtgggtgccgtgattgatcctggacaggcactcacactgcgacggctcggcatcaccccaccacaatcgaataacatctacttcaattcaggggtcatgctaattgatacggtccggtggaatcatgcatccatcacagagcggactttccacttcatcaatcatcatgcggatcgcttacaattccatgatcaagatgcgctaaatgccactttggttggtaaagtgaaactactccatcctaaatggaacgtacaaaactcattgctctttagaaaacatgcgcctatcaacactgaatatgcccatttatttgatgaagcaatcgccaacctggcaatcgttcacttcacaacacacgagaaaccttggaacactctaaaaagtcaccccttcttaaaccaatatcaaaaggaactcaaacaattacatgcgcaacaatccgatacaatcaacattgtatcggccgtcaattccgatttcatcgaaacgctggcaattctatacgcctcaattcttaatcacaatgactcacatcgacactatgctttttacgtcttagaagaccacctcaccgcacgagataaagcggtcttacagcatgttgtggctcgctttgatgccgacttgacctttgcagaggtcaacgaatctttactggctaatactgttgaaagtgatcggatcttaaaaacggcgtactatcggattctaattcccgacgtgttccctcacctcgatcgtgcactctacatcgattgcgatgcgctatgcctcacagatttagcccggctatgggatatcgacttaggccaatccttcctcgctgcagtagaagatgctgggttccacgaacgcttagaaaaaatggctatcgattaccaaagtccgcgttactttaattccggtgtgatgttactcaatctcaaaaaatggcgtcaacacaatattgtcagccgtgtactcgacttcatcaatcagcaccctgagaaattacgcttccacgatcaagatgctttaaatgcaattttgcatgatcggtggattcaccttcaccctatgtggaatgcccaaacaaacattttgatgaacaccattacaccaccaactgaacacctcaaaaaacaattcttagaaacccaaaaagaacctgcgcttgttcacttctgtggtcacgaaaagccatggcacgcctcatcttcccatccattcacgccacaatatcgttactaccggcaacggttcttaaaacaaaaaaagcggctcgttcccttcgccaatcgccgttccctttctcaacaaggataactacaaaaaaagcgggtgcttagacaaatttatttttgtctgagcacccgcttttttaattgctaaaaattatctttttattgaccgactaagccatcatgaatcttatctaggttccacttcatcatcgtatagtaagtgtcaccttgcttccctctttgcgcgagtgagtctgtaaaaattttcgcataaattggtaacccagtttcctgagcaactttttccattgatttcggcgaaacagaactctcaacaaacagatgcttaacatctgaatctgcaatttttgcaagaaccgtcttcatctgttcaggtgtgccttgcgactcagtattaatttcccaaatgtaaaccggtgtgacctgataggccttaccaaaatacttaaaggcgccttctgaagtcaccaagacccgctgattagctggaatatcggcgaatttagtttgcgcatcagtatgcaatttgcgcaaacgtgcagtgtagcgatccgcatttttgcggtaatcatcagcgtgcgctggatctttggtctgcagcgctttcgtaatgttttcaacgtattgaataccgttcgccaaatccaaccatgcgtgtggatcgggttctgtttggttagttgtcaaatgttgcacctgaattcctttgctagcagcgaaaacatccttttcgaattgcttatgcgcgatcttaacaagttttctaaaccaaccattgccacccgtttcgagatttaacccgttatgaaaaatcacatccgcatcagtcgcttttgaaatatccgtcggttgcggttcatattcatgcgggtcagttccccgtttcacaatactgtaaagttcaatgtggtcttgaccaacattatggaccatatcttcaagaatcgaattcgtggtcactacacgtaatttagtctgctggttcgtttgttgttgtttagattgggcgcggtgctggatgaaaccatacacaccacccaccaaaccaaaaactgcaattaacgtcacaatcatttttttcatgctggtcgtcctcctttgcgccacttaaggaaaccttgcttaggcgcgcagatgaatgaaatggcaaagagcacggctgccatcataacaatcgccggaccagatgcccagttcaatgtgtaactgaagtacaatccactgattgctgacacagcaccaatcccagccgataagaagagcatcgtcactaagcgatccgtccataaaaatgcggtggctgctggggtaatcaacatcgcaacgaccaaaataatcccgaccgtttgtagggctgaaaccgtgactaaggttagcaccaacattaaaccgtaatgtagcacctgcgtttttaacccatatgttttcgcataggtttcatcaaacgaggtaatcaataattctttgtagaagaatgagacgaataagatcactaagcctaagacaatcgccgtactcataatgtcgctatcactgacggcgagaatgttcccgaataaaatatgatgtaagttggttgcactttcggccatcgaaatcaggataaacccaagcgcataaaaggcactaaagacgaccccaatcgaagtatccgtcttaattttactatgtgttgcgacaaagccgattaagactgccgctaaaataccaaatacagatgcgccaaccagcacattaattcccaacatgtacgccactgcgacacccggtaacaccgcatgtgaaatcgcgtcacccatcaacgacatcccgcgcaaaatgatgaaactcccgacaatgccagacatgatgccgaccattacggcggtcagcagcgcactctgtaagaattcataacgacccaacgcactaataaaagctggaatactcgtcattttgccacctcctgtgcatcaaacaagacagcggataagtccgcactaaaagcacgctcaatgttttgcgcattataaactttttcagttggtccataatcgacgatgccgtggttcatcaccactaaatcatcgaaatattgcgatactttattcaaatcgtgatgaatgacgatgatcattttacccgcatcacgccactgtttcatgattgccataatcgcggtctcactctgtaaatcaatcccaacaaacggttcatctaaaataataatatccgcttcttggacgatggcgcgtgcaacgaaaacccgctgcaattgtccacctgacaactggccaatttggcgttgcgcaaattcgctgagcgatacttgttcaagtgccgcgcaactggcttgttttgcctttttacccggatcgcggaataagcctaacttgccatacgtgcccgttagcaccacgtcaaaaacgttaattggaaaatttaaatccaaatctttacgctgttcaacgtatgcgacttgcttctggactgcgcgcattggtcgatcttgatataaaactgagccttgccgtgccttaaccaaccctaatattgctttaatcagagttgatttgcctgcaccgtttggtccaatgatgccagtgattttgcctgcgtcaaactgaacggcaacatcagtaaatactggtgtgtcatcgtaagcaacggtgaggttcttaactgataacataaagagcctccattcttttaggtaaacctaacttttctcaatacagcatacatgattttaatggaattaacaaatattttagtttaggctaacttttcgggatttctgtggaacgatggcttagaatgtttcacgtaaaacattttactaacagcctattagatacaaccttttattactaacctttattttccataatcatttaatttactactggtaacaacctctaaccaaaagacatctaacctattagccataaaagtctaataggctagatgtcttttttaaaattccacatacaccgttacaaatttagcatgtttctgcgttggtacctttatcgtattgctatacacttctaaagcccctattgtttcttcttttaaccgtttattttctttaatcagagcacgttcatttgatgataacactttagtgttgttaggatcagcttgtttaatccacttagtgaccgttgaaacactgacgttgtattctttagccagtgagttggccgaacggccagtctgacttaagctaacaatcgattctttaaattcatttgaatatttaattgccataataaaaagctcctttatgatgtattatatcgaacagtttgtccgtaattccatcataggagccttatgatgtttaatgacacggcctcaacgttcaaacaaatcgatattgattcttatcaagaaattgatcatttaaatcaatttttagctgaaaagaaggctcattacacaacattaccagcgaattcaacgggcactctattaagcgaaatgttcttctttttgctcgactacaatccccaaatcaaacccttaaaaattaatatccaatacactaaaaatttctatgcagcgacgatgattaccaaaaatctacaaaatgtgttcaggtcttcaattgtgttcactgattagatcgaagacgcagacctcatcatctctgatcactacgaacatgacgagtctttaaacggacaattcttcttattcagaaataatttcgaaccagacgattgatccttattactgaagaacgtattagcgtatatttatacgaattcttttcataaacgactgaattaaaaaccaccgtactgctaaacagtacggtggtttttgcgttattgattttcaagttgttcttgcaaccattccagattaacttcatgatgccgtttagaattagtcatcatcttgataaacatcggttgcaagtcagtcggattggctagtgccgcgtcaatcgcacggattttagcctgtgtctgttcgatttggctttttaacagcttatccatctgttccggtgtcacttgatccgtgaataatagtggtgtgtagaacggaaacgtaatcggcttattctggcgaccataatgggcaaattgttgctcaaaagccgttatgccagcggccgttaattgatagcgattcttttcccgcttagcgggcacgtcgtccgcgactttttcgatcagtgccttttctgccagctgctgcaagttatagtaaaacgagcccttcgtgaagttcacgaaaaaagcgtagtattggctttccatgtcagtcaataattcgtaaccatacgcgcccggctttttctttagtaatcccagaattaaaaattgaatcatttactagtctccttgcccgttagctgtgcaataaagtcggcataactcatttgaccaaatgcaaaatcacgactcaatcggtacatcttttcctgctgtgattctgggcgttgatagagttggtctagttgaaccgcttcatctgcaaggacgtcaggaacatcttgatgctgttcgaaagcttggaaataacgaataccaaaacgccgttgcgaggccgcgtcaatgtgaatcccatctgggttagccgttaattcggcagcgttgaccaaataactgtgtggatcttgcgcgacaacttgcgccatttcgcgattaatttcgttaaattccgtggcgctcgcgccgaaccctactttgcctaaaaaggctggcaattgacccgcaatgattggtaaatcaggttggcccaatgctgcacgtaaatgattgaagaccgccgtcaacttggccgcatacgtttgatagccaccatttaaactgtcactttcaccttgatgccataacacaccgattaactcactagattcctgtgcaaatttcgcctcagtaatcgcgtgacgcatcaaaagttcgtcgctcgcccactcatcgatggtgctcccaccttccgcgcaggggattaaccccaattcttcatcaggatgagcttgcacccacgccgcagcaaatgacgcagccggcccaacacccgcaacctcccgatcaaaatgaatcggttcggccatcatttgccagcgcccattgcgcagcatcttcacgcgctcgtgccgcaatcccggcacatcttgaataaatccccgcccagccatattcgactgaccgactaataaaattgacttcatcataaaaatcctcctgaaactgatttttatagtatagtctaattagactatgaatgcaaaaagaaaccacaacttaattctaaattgtggtttcttcttaatcctttgtcaaattcaaatacaaactatattgcactggtttttcaagaattaaattcattgttacgactggatcaattttaccatctttaacaaccattgattcttgacgtaatgatttctgatcaatatcaacaagccctaaatagtagaaatcaatcccttcatcatcacttttcttcacaaatagtggcattttcaattcaccagacgcattcccttgaaccattgtttggacctctggtgactctattttccggggatgacgcgtgaacatacgcatcgtctgactattcaaaaactcatcttcatatttgatgccgtcatcgatatcttgcgatttcgcgtaagtaataaatagcggacaagttccataagccgttttgtagccataaattgttgacgtctggtctttttcccaacctaataaacgacaagcatccttacgggtatatttcttaccaatcgttaatggcactgtttgatcgtaaccatctgccttgaatagacctgtcgccaaaacatcatccacaagtaatttgaaaaacgaatttgtttgataagctgttttaatccgcccgtttagtcgatattgattattgtccaatgttacataggcatctcgcccatacttatcttgatcagccgctttaaaaaaactcaaactcaggattaatagcatcgaatccaatgtcttctgatccactctagcatttacttgctcgagggcctttttgaagtcaccaactgataccacaccatctttttcaaacaacaacttcaataataatagctcgtgaattcgcatcccattcaatagttctttagataacattcttaaaaccatatcttcgtcaatagatagatggacgtcctctttcatcttcaacaagaactggtaatagttgtcgtatttagcaaccagaactgagccatcaatcgaaccatgcgttgtaaaatcaaacaacaacggtactctgccaagacgtttcttcaaatcttgatagtcatcgcgtaactgcttcaattcagttaaattgctattattaatcgaatcgtaaactcgttgtttggcaacttctgtaaaattaatcgtcgacatcccgataatttggtccgtactcaacttactacgtagactatttttattccgtgaatggtcacctgttaaagcaatcggaatcaaatagttattcttgtagtttccgataaaatcaatcaccgtcacaaaatctttacgcggaaacttccgtaaaccccggcccagttgctggataaagataatactggattgcgtattccgcaacattaccacttgattgatacaaggaatgtcgattccttcattgaaaatatcaaccgtcacaatatattgatacttaccagcttcaaagtcacgaatgacttgttctcgataatcaacactatcttcgccagtcaaagcaactgaaggatagcctttagcggtcataatccgcgccacttctttggcttcatctttccggctacaaaaaattaagccatggacctgatcacctgcataaccataatagttcaactgctgttcaacataatccattcgttcagaggaaaccaaattctgtaatggcgtcttctcctcaccaatttcgccgtttaattcgtaatctgttacaccaatataatgaaatggtgctaacatgtcttcttccagagcatcttgaaggcgaatttcgtaggctaaattgtaatcgaacaactcataaatattaaaatcatccgtccgttctggggttgccgtcattcctaataaaaattgtggcttaaagtaatcaatcacccgatgataactgctggcacctgacttgtgcgcttcatcaatcatgagatagtcgaattcttcaggatcaaactgcgataatgtattttccttagctaacgtctgaatcgtcgcaaataaataccgcgcatctcgctggttttcattgccggataagatcccatattcagaccaatcaccgcctaatacctggtgaaaactggctttagccttcttcaaaatctgttcacgatgcacaataaacaagaattttttggggttcacacgtttgacatcaaacgcgcccaaataagtttttccggtcccggttgccgaaacaattaatgctttttgatggccttcatgccgtagaaaatttaatgatttcaatgcgtctttttgcatatgattaggtgtaatcgtaatgtagtccgcagactcttcagcgacagtttcaatcggttcatttttctgacgattaaaaacaatcgtttgataatcagcttcataatctgtaatccactccggtgttaatgctgctgcacgttgccattgctgttcgacctcattgataacttgatcagttaacgccgcattttcatacgaagtaattcttaagttccattcgtaattacgaatcaacgcggtttcggtcaagttcgagctcccaataatcatagattggtattcacccttatcaaagatatagcccttagcatgaaatgaatccgattgttttaaaactcgtacttcaagatttgggatttttaatagttctttaaacaccttaggattgttaaaacctaaataattagaagttaaaatacggcccgtgacgccttttaaggcgaggtccgctaacttaggcttcaacatcgttaagaccgcttcagtaatgaaagccacggcaaaagtgaagtgctgacaagtcatcagttcttcatccaaatgcgtcttaacatggtcttctgacgtgttaaataataacttcggcaggtattcatcctgagaaatgtagcgctctttatcaaccaatcccgctaaagctgaattttgtaattcagtctgtaaatccgtcataactactccctacttgaacgttaattgactcaaatcttgtttttgaatggcttgcatagctgccacatctgccggtgcccaggttaattggtccaattcagattgacgacaccatttcatctggctatgcgccactagtccaaaactttcctttgtgaactgcgcataataaaccgttaaatgaacgttgccaaaatcgtattggtgcacatcagttgcaactgccggcccaactaaaatatcagcacccaactcttcttttaactctcgcaccaaagcagcttccggcgcctcatccggttcgatcttgccacccggaaattcccataaatctccaagaatccgatcagtggcccgtttggtacatagaatttggttatctttgatgattgcagcaccaacgacatagatatctttcatgtagaacaccccccgtaaatttaagcagactcttcattatccttcaataaatcacattttaaaatattaaacaggcaatcaatagattcttttaaattctcatcagaaagatcattcattttatcttctaacacctcaggatggtctatctcatggctcctatgatggaattacggacaaactgttcgatataatacattataaaggagctttttattatggcaattaaatattcaaatgaatttaaagaatcgattgttagcttaagtcagactggccgttcggccaactcactggctaaagaatacaacgtcagtgtttcaacggtcactaagtggattaaacaagctgatcctaacaacactaaagtgctatcatcaaatgaacgtgctctgattaaagaaaataaacggttaaaagaagaacttgatattttaaaacgagcggcggtgctcatggcaaaaagctaattattaaagggcgtgccctcgtgttagaagtcgtcaacgctaatttacttgctgggcaccgcattacgcgtatcttatcagtactcaaaattccgcgctcaacctactatgattatctacattggcagccaagtagaactgaacgccgccggcatttaattaaacaagaagtgttaacggcttggttaagatatccaatgtatggctacccacgattaacgatcttactaaatcaacagtctgatattcacgttagtcagcgtctggtctatcaacaaatgtgtgaattagggattagatctagaatggttaaacgaatcaataagccaaccactcagactgattatgatcagcgaccaaacttgattaagcagttaactgatcaatctggtattttattgactgatattacgtacattccccttaaccatacttggtgttacctagctagtgtctataatccagtaacccgacgggttattgcttaccaacttaatacgcagatgactaaagaactagcgactaacgttattacccaagtcatggcgcaagcagttaaaccacaaattattcatagtgatatgggaagccaatacacaagtgacttatttgaaaacactttatcgaagtatggtatcaagcattcttactcccgaaagggtcagcccggcgataacgcgcgaattgaaagttttcattcaattttgaaacgtgaatacgttaatttccaagattttaagacaattcatgaagcaatcgccggaattgataactatattcgttggtataacagtgatcgtatttcacttgtagcgtagctacaggctattaaattcaataatgttggggcttatttaatatactctaaagcgtttttaaaatctgaacgggactaaaacttcggcctccgaaaattaaattaagtaatttaaattgaaagtcaaatttgttcgtacttttatgtccggattcttgacataggagccagattaaaatataaaagatatacttataataggctacgcctttttattgaattaataaaaacaaaacaaaaagaacaccgttgtacataatgtttgtccagagtgttctttttgtttggaattattttaaatgatggattactggttatgtaacctgattgccacttattaatccaatagcgacgttttaatctatttaatgattatttctacgtcacatagctaaaaacgcttatacgggcaaataagccgttataacgttaaagacttggccccttaaaaatatcacgcgttaattcaatgatccgattgattaatgctttaacttgttcaataccccaatctaatctactaggtgctattttggtgtctggatcttctctagctgtcgtcaaggtttttaaccatgactgggcctcttttttattttgagtgagttcttcatgatccagcttataaagaacataccgggcctccacatccgtatgggatagttggtcgacaccataatcatttttaagcatgtctcgcatggcataatccatctgttgctgttctcgctgccgctgctgaagcgcttgatgcgtttctttcaggttttgatagtcagattgaatttcagctaattgcgctttgacttgtcctaacgtttgcttgaggtcttctgcctcattctggctttgtaaggtggctttcttcatcgtggctaacacatttttaaagcgatctaagtcatctggtttaagcaccgtcttaccaaaaaagtttttagataagtcttgtttaaaatcatcaattttttttcggctaagtccacttccgttaaggcttgatccgtgagtttgagtaaggcctttttagccctaatattttcttcaacgtcagctagttcggtttttaggtcgttaaactgatcattgtattttttgatttcagcgacattctcaaacggtaaggttttgtggtttaaaatgccttgttcataaaagggcagcaccttttttaaatcctgatctagatcctcatgaaagctttgcaaatcatggcgcgtgagcacttctttagcggatactttatagcgtgattttttatcatcaaaaacaacggggacaaaggcatagtgcaagtgaggggttgtctcgtcataatgcacgacagcggccacggcattttcttgaccataacggtcattgagaaaattgctggttgcttcaaaaaaggcgctctgttgatcgtggggcgcttctgagagttcttcaggtaaagtgacaatccaagtcgctaacgccttcacatcgtctcttttcatgcaataaacgtcatttaaacgctcattgaagcgtgaaagcatatcagaaccatctgtcatcagatcttgattcagataagtttttgacacatcaatttctttgttggtgtgatggtcagttttacgttcaaaatgaacggctaagccgggaactgaaccactgtgttgcactttaaatgaggtgatctttttgaatcttttaagaaattatagctgctaatgcagcaccagtccgagagtttttatcgtttaggctatcttttggatgaccttcaaaacaaacttgaccgccgaatttaccagcatcgggtcccatatcgactaaccaatcggctcgtgaaattaatttcagattatgttcaatcagaattaatgtattgcccttatcaaccaatccttcaaataaatcgatcaattgttgagtatcctgtaagtgcaatccggttgttggttcatctaagaaatagattcggccggtatgattcaattccattgctaacttaacacgttgcacttcaccaccagataaagtggtcatcgactggctaagattcaaataaccaagtccaacttggtggagtagactaacctttttgtagatatctggcacatctttgaaaaactctaaagtgtcgttgatagaaagatttagaacctcagaaatatctttgccatgataagtgtattgtagtgcttcttggctataacgtttcccatgacacaactcacattcttgaacgattggatccatgaatgccatctcggtgatcatcacacctttacctttgcaacggggacaagcacctttaccgttataactaaatagttgtgttgaaacgccattgttggctttactgaaaagctttcgtagaggatttaaaatgttcaagtaagttgcaggtgtagaacgaatattcaaacctacagaatcctgactcaaatcaatatagtcttgatcagaaacttgttgtttgaaagcttggactaaagtactttttccagaacctgctggtccagatatcacggtcattacaccttgagggattctggtagatacgtcttttaaattatgagaagttacatgattaacatttagccaagattgaggttcacgaggcttttggaaagtgattttttctcgtaacattttacccgtaatcgtatctgaccgtaatagttcgtcgtaggtaccagtgaaagttacttgaccaccatttttgccggcttgtggtcccatttccacgacataatctgctgtcgaaataatggcagggttgtgatcaactaggataatggtattgccatgttccttgagcttttttaaggattgggtaattaatttaatatcgtgaggatggagtcctacacttggttcatcgagtacgtaaactaaatcggatagggaactcgtcaaatatttggcaattttaattcgttgagcttctccaccagatagcgtatcagttccacggccaagggaaagataacctaaaccgatgtcgaccaaagcttgaactttactatgtagttcacgcaccattgttttagctttggggtccgagatattatccaaaaattttaggacacttactaaatccatatcgctgacttctgcaatatttttgccagcaattttaccagttagagcctttttgttcagacgtgttccatgacatactgggcaaggttttcgagtgacaatctttgataaggcagcttcatgatgacgacctgaggcactatgaataacagagcgaagcatacgtggaactagtccttcatataatgccgtacggccccaatttgccggtggattttttaatttttgttgcggagcgtgcatgaataaatcatattcttcatcggtgtagtctttaatttttttgtctaaatcaaataatccactgttgccatattccttccaacgccaagttcccggttgaaaaccggcaaaagtcattgcaccttcattgagtgatttattaggatcaattaattgacgttcatctatgtcgtcaacaaagcctaatccctgacattttggacacattccctgaggtaggttaaaggaaaaccattcagaatacccaacccaaggctgtccaattcgagaaaacatcaaacgtaagacggaatagatgccggtgtaggttgccagagtagatcgagaattacgaccaatagacttctgttcaaccacaattgccactggtaagttgtcgattcggttcacttcaggttgaccgtatttaggcaaatattgttgggtgaaactaggaaaagtttcattcaattcacgtcgggaaacagcggctaatgtatcaaaaactaaagaggatttaccagacccagaaagaccagcaaatacagtcgttttatgcttaggaatatctaaactgacatcctttaagttattttcttgagctccatggatagagatagtcccatctgcaaataaatcagtcataaaaacctccaacagtaaatttataattccattatatatagaaatctcgtttagcaaaaataatcggctctagaatttttggtgttggaaagtatttccattccaaaagtactaggccctaatttaaaaagccattgataatggatcaaaaacggccactagggtataccctattggccgcttttatttctgtgctatactaggaattacaagtgttcattagaactgtccaaaataagaattggaaatggctaaaatcggttatgcgcgtgtgagttccaaggagcaacatttagatcgacagttagcggctttaaaagacgttgataaattatttacggataaattaagtggggctaacactaatcggccagaactgcaaaaaatgttggcctatattcgtgagggtgatattgtcctggtcactgaattagatcgcttaggcagaaacaacgtaagcacctaatcaaatgctggaccgtagtttttgtgcgctgaaaaacatcaaaagacgcgctgtgaatgcttttcggattcaaagcatgcacagcgcgtcaaacgtgtttctactatattaatgtgattttacagcaagtggatgtcatgcgcatcgcaggcatcgatcatttcctgtggccacacgctggcttggacttcaccgacatgggctttgccaagtaacaacatgcataagcgtgattggccgatcccaccgccgatagagtatggaagttcttgatgcatgatcttttggtggaatggtaaggataaacgatcttcagcgccggcaatcttcaactgtttcgccatggcgtcttcatcgacccggatgcccatggaagatacttcaagtttgcaatccaatggttcataccagaaaatgatgtcgccgtttaatgaccagtcgtcatagtcaggggcgcggccgtcgtgacgcttgccagatttcaaagccccaccgatttgcatgatgaagacacagccaagttctttggcgattttatcttcgcgtgccatggggtcgaggtccggccagcgatcttcgagttcttgcgtggtgacaaaatgaatttcgtctggtaaatggtgcaccgcttctggatacttataccaaacttcatgttccatatgcttgatcactttgaagatttgacgaacagtagcctttaaggtttcaacggtacgttgatccttggtgatcactttttcccagtcccattgatcgacataaatggagtggaagttgtcgaggtcttcatctttgcgaatggcgttcatgttggtgtacaagccttcgccaggcttaaaaccgaattcgcctaaagcgttgcgcttccacttggccaaagaatgcacgatttccatttggtggcctggcatgtccttcatggtgaaggatactgggctttcagtcccgtttaagttatcgtttaacccagtggctttgtcgaccatcattggcgcagagacccgagataagtttaattgcttgccgaattcatcttggaaggtttcgcgaatatagcgaatcgcttcttgggtcttacgaggggacaactttggatcataaccggttggtgttaataaatgcatgaacaaaactcccttgatttatttaagacaaaataaaaaagtcttttgccccagctatcaagggacgaaagacttcatttcgcggtaccacccaagttgtccggcataccccggaccacctcattagcgcacgatttcatgcgccatcggatgataacgtcccgatcagacgaccacgcctactttgcaaggcatttggggtggcaactatgagagtgttattcaaacgactggtgtcatctcgggttctcactagctccgagtcactgtgcggcctgatcgtcttacttgtctctcgtcagtttttcgcttttttttaatgtttcctatcatagccggtatttggcttttgcgcaagtctttttcaaaaaaagttttcccgcgtccaaatcgcttcggtgaaatcaccttgtggcgtgtggatgacttgacgttgttgcgtgtcgctaaagccggccttggcgtagagttgctgggatggggcattgttggcaagcaccttcaattactgatgcggataggggtcaatcaattgtaagccagcatgcagtagtcgactgccgaggccttgatgttggcaatctggatgaacgtaaagtgagtaaagttctccaaaagtggcaaaatgctcatcgcgagcaggtccagcggtgacaatgccgatcggtgtcgtgtttgaaaaggccaatatcgtatgctgccagcgtttttgcggctgccaagtggccggcgttagttgcttgagataagcttcagggagcaaatgacggtaggccacttgccaagtctcaaaatataattgggcgatggcaggccaatcttctgtcatcgttgcaggtttaatcgtgatcatgccgtcagtataacatggctacaccgacagcctagacttaggctgatccatttgaaagtgaacaacatcaggtttatcttccatacaaatacctcaccaaatttgaattgatgaggtaagtgtagcgcgctaaattgttgatgaaaatctgtcatttgattgggtgcttacgaaacaaccaggacttaactaagattatgaacaccattcagaacaaaggtgccaccctagatgtgttgaatttgccgtccatgacggggattgcggatcctaacttgcgtcaactgatgactaacttaatcattgaactgtataagtatcaggccgaaagtgaacggaagcgaatcattgagcgtcaacaacaggggattttcctggccaaacagcaggggaaatatcatgggcgcaaaccccaatataccgaagatgatccccgcttactacatgcttttaagctttatcagacgggcatgagtgatgtagacgtcgcccgtaataccggtattaagcgaacaacttttatcagatatcgcaagaagtgcaatataaaaagatcgtaaattgcaagaacaagttagccagtcgttgaggacaatcccagaacaggccgttaccaaatagaagttgtggcgctagagagacgacctatatattgtctactgatgcttgagcgtataaataatcaccataattcaattacattggtgcgtttttcgtctacttctcgcccccgatgggtgaattaacctcccctacttgctttctttacccatactttattatagaatcaattattagccgatttattagaaagggttaataagcttctttgggtgcgcttttgcacttccgaaccggatctgcaccccgatttgagaagttcgttcttcaccccgttttggccccttttttggtcggggcgtggcacttttttcaaaaaaatcgctttaggggattgccaacttaaataaagttcgctataattggaaaaaattaaataagagaaaaattagaaagacgagtaggtcgttgatttgtccagtgagtcagggctagtggaaacctgaccaaccctctgcgattgaataacactttcgaagattactaacccaaatgcattgtaaagtaggcttagtcgtgaccggaacgttaccaccggatgagtatgtttgtactcaatgaaaagtgggctagtaataccctagccaacttgggtggtaccgcggaaataagcctttcgtcccttgtcaaaaaagcaaggggtgaaaggcttatttttttcatccacggtttaaccacaaaggagactttacaatgtgcggatttttagctgttgattctaaggaatttgatttaacgaccttttgcgacgccctggagaaaaacgttgaccgcggcccggacatgaccgaaaccgttgaagaagacgcggtgatgtttggtttcaaccgcctggcgatcatggacctgtccgatgacgggatgcaacccttcaagggcgaagattgcaccctggtctgcaacggggaaatctataacttcttacagctcaaggagaacgtaaaagacgacttcagcttccaaagctctagtgactgcgaagttttgatcccgctctaccgtaagtacgggctggacaccatgtgcaagatgctcgacgccgagttcgccttcgtcttatacgacaaggtggccaagaaggtcgtggccggacgtgacccgatcgggatccggccaatgttttacggctacaccaaggagaagggcgaaatcgcctttggttccacggccaagaccctgatggacttgtgcgaccaaatcttcccgttcccaccgggccactactacgacggcgaaaagttcgttacctaccgcgacccggccatggttacccggatgcacacgccgagctttgaagaagccacgaccggcatccgtgattacctggtcaagggggtggaaaagcggctccacgctgacgctccggtgggctacctgttgtccgggggcctggattcttccctggtttgctcgatcgcatctaagttaatgccgggcaagaagttacggacctttgcgatcgggatggaccgcaacccgatcgatctcaagtacgcccgtgaagttgccgactacttaggcactgaccacaccgaattcatcatgactcgcgatgatgttttaggggcgctgcgtaaggttatttataccctggaaacctgggacattacgaccatccgggcctcgatcggaatgtacctattgtgcaagaagatccacgaaacgaccgacctgaaggtgatcctgaccggggaatgttccgacgaaatttttggctacaagtacaccgactacgcgccaaacgccgaggccttccaaagcgaatcgatgaagcgggttcgtgaactgtacatgtacgacgtgctgcgggccgaccgttgcatctcggctaactcccttgaaggccgggtgccgtttgccgacctcgacttcgtggaatacgtgatgtccttagacccggacatgaagatgaaccactacgacaagggtaagtacctgttgcggatggcctttgccggacaagactacttgccagacgacatcttgatgcgggaaaaggcggccttctccgatgccgttggtcactccctggtcgacgacttaaaggaatacgccgacgccaagtacacggatgaagacgtggccaaggccagcgaaaagtacgcctacaagacgccgtttaccaaggaatccttgctctaccgcgacatctttgaagaattcttcccgggcaaggccgaatggatcaaggactactggatgccaaacagcgactgggaaggttgcgacgttgacgacccatccgctcgcgttctctccaactacggggactcgggcaagtagtgagtgcggaccaaccataaggcaggccgtgggctaaggataggacagaggttgatgcggaacgcatcgttctccgtccggacttagccactaggcctgcggttggggagcacgttatcggaagtgcgactaacctcctcgacaggccgtatggctaagttagagataccgcaaggaacattacattcctaaatcaaagggcgtcagcgagttcattaattgaaccactggcgcccttttctatctgtccttttatttgaccggtccgataaccatgatataataacaatataaaagggaggctataggaagcctccctgggtagagccgatatttcggtgaccattactgttagttaaaaaataaccgctagctgtgccaagctaaggcggctattttttttgcactaagtttgattagcgcaacgatcagcatcagcaggtaaatggcaaaattgtcaaaaataacaacgcagtacaccaatgggctccagtagttcgcaagcgaacataactggagccctattgttgtttgcgggggcgagaagacgaaattaaaatttctgtctcgctcccccgtacaataccccttagggttgacactttaaataataaaagtgtcatctctagggggtgttttgaataggaacatattcaacgacggaaaaattaaggttactcagtaattaccaagattcagactactcactcagggtatacgcggattatcaccaggtgcggacctctagccttaacagatggattaaacaatttttaacggctggtttggctggattgattcgccctgaacacaatcacaggtacacacttcaaaccaagcgatcagccgttaaagcttacctttcaggtaccggttatgtccgtataattggtgtaaattctaaataggactttgtgaaatctgaaaggaacttcattatgccaaaagttgaattaaatttagaggatgacgaattaaaggagctattactaggtgatcgggataaggccatgcaatcaattatggccaagatccttgatgaaattcttaagtccgaagcgactgagcagattaaagctaaggcttatgaacgttcggatgagcgaaccaattcacggaatggttatcgggttcgtcagcttaccacacgagtaggaacacttgaactacacgttcctaaactccgtcatggcaatttttcaacacagctgttcaaacgctaccagcgtagtgagcaggcctttgatttggcattaatggaaatggtaatccaaggtgtttcaacacgtaaagtagctgagatggttctggtgcaaattttcctcgctgacttgattttagtatactgggtgccaagaaacgagggattgcgcgcatgaatcactttaagggacgccactttcaaaaggacatcatcttagtagccgttggctactatttcagattcagtctcagctatcgtgacatcgttgaattgcttcgggatcggggtatcactgttcatcacaccacggtcatgcgttgggttcatcactatggccccatctttaaggctctatggcgtcggcatcaaacagctcacgctaaaagttggcgaatcgatgagacctatattcgagttaaaggccgttgggcctatttgtatcgcgctattgacagtaacggtttgaccatggattttgagctacgaaaacaccgcgattataccgcatcctatcactttttgaagcgtctcttgacgaccaatggtcggcctgatcgattagtcactgatcaatatcgggcaacactgaaagcagtgaagcacctgataaagcaagactatttgagcaaatcagcccaccaatgttccaaatatcgaaataatttgattgaacaggaccaccgattcattaaacgtcatcgtgtccgctcagcaagctttcaaagcattcgaaccgctagtgcaacgttgagcggtgtggaaattgttcacgcaatacgcaaaagaacccgacgagagttaagtctcatcgggttctcagtcgtggacgaattagaagcattgttagctgcataaccttcaacataggatcaatagctggttagatggtcatctctcacactgtttgcaccagatccgcagaaacaaccatgatttgactaagatcatgaactccattcaaaataagggggccaccctagatgtgttaaatttgccgtccatgacagggattgctgaccccaatttacgtcaactcatgaccaacctcattattgaactttataaataccaagctgaaagtgaacgtaagcggatcattgagcgccagcagcaagggattgccttagctaagcagcagggtaaatatcatgggcgcaaaccccaatacacccaagacgatccccgcttgcaacatgcttttaaactttatcaggcaggcatgagtgatgtcgatgttgcccctcaattttcaagtcaagtgcaacgatgataacgaattcttgatagtggtctaggctgttacgccatgcatcggtagtaatcgcatgggcgaagatagttcagaatacgtctgggacgacggttcagtgcggattggactgcttgaatttcaaccagggtaactgctctgagagacttccctttcgggaagaattccctaagcagtccattggcgttctcgtttgtgccacactcccaaggcgagtacggatgtgcggtcattcacggccgcaggacgcaactcgattgagtcgccgtatattttcttattcttacgcttgtgggcgttcttatagcctttgatgcggcgtcggagcttcttgggaagtgtcatgttgtctagctcaagcagcccggcgtcgatgtagcgatacacagttgtcgttgaagggcaagccttgccctggtcgcgatagaagtgtacgaagctatcaacgctgtgtacgcgcggcttacgagtaagctccctggcgagagccttgaagaacgcacggccggtcttaagaaaggcgtagtgaccggttctatcgcgtttacggtcgtgcatggcttgggcagtttccgcaagatagacttgatgcgagtgacgcttcgagtcgagctgagttacagatccacgcgtgatttctcgtgagattgtcgctttactgcgatgaagcttctgtgcaatcacggtcgctaaaactgagttgttggtaatgcttgtgggtgttagtctgagagtgggtcatgaagattcctgctttcttgtttagctagcactaacaagaataggtcttcatggcctttatggtctagtcgtcagggtgttgcacttgaattgtaaactggggaaatactttccaacaccaaaaattctagacccgtttgtttagatagcgatctagcggtgaccatgccaactaatcttgatccggtcaccgccgtcagcttagtcactccagggattgtcgcttacaaaacggtgcgctactttgcggacgtccaggccgaccaaacggtgattgtcaaaggcgctggcagcccagtcggcttgttaattattcagttagccaaacgattagatgcccacgttatcgagattgctagtgaccgttatgctaacttgattgcgacactgggagtcggctaattcgtcgactatcagcatcaaaatccagttcacgtgttagccgaccgcggtgacgtcgtaatcaatgtcgctatcgatggcgttggtggcaaagatgacttagcaacggccaaatttgatgcgaccatcgcttcattcgcccgtcacttgccagccaacagtaaatcaattcgtttccaagcaatccaaccgaccgaagtgatttctgatcaagccgccttacaattactattcaagttgctagatactggtcaattgaccacgacgatcgatgaacaactaccgtttaacctcacgggcttcattcaaggtcaccaacgactagatgagcctcacgtgggccaagtggtcgtcgcgcgctaaaaaaactgctttcaaaagttatccttttgaaagcagttttttagtcaggtggtcgcttattaagaccatcgcagaattttgagcaacccaattcacactaatcgtaacgattgggtatatttcaaggaccgcctcaattagccaagtcctggatacctatgcgagttggtagacccaagcctcataaggccgtaatttatttggctgctgctcgccataattactaatcaagcatttggccgtgggcgtcagatattgatccagtggtcgggacagtgtctcggctgtgaaattgcaacaaactagccaggtccgcccttcccattgccgtgcatataagaatacctgcggatcatcggcccacaagagctcaaacgaacctaacgtcactaaggggtattgatgtcgtaattgaatcaagtgctgataatagtaccacactgaatccggatcagccaaagctgcggcagcattgatttgacgatagttgggattgaccgtgagccatggcgccgcgtcactaaaacccgcgttaacctccgtgtcccattgcatcggcgttcgcgagttgtcccgagaacgcgccgctaatcgggccatcatatctgccggtgatagcagctggcgctcagtcactaaatcacgataggcattgagcgattcaatatctcggtaactggctagttcagtaaaatgagcgtcagtcatccccagttcctcaccttgataaatatacggggttccctgtaagaggtgtaaacacgttgcgagcattttagccgaacgtacccgatatgctggtcggtcatcaccaaaacgtgagaccgctcgtggcgtatcatgattgttccaaaacaggctgttccaagcccgcccttcaagtccgacttgccagtcactaatgactttctttagcgccactaacggtgtcttacgcgtactccacttaccaagaccatgctgactattatcaagtcgcagatgttgaaattcaaagaccatatctaattcgtgctgatcagcgcccgcatacttcagcgcatccgctagtgtcaccccgtgggtctcaccaaccgtcatgatatcaaactgtgacaacacttcttggttcatttcttgcaagaattcatgaactcgcggtccgttcgttactcgagcatcgccaaactgactgtgcggtttcagtggaccatctggtaatccgggtaacttagagatttggttaatgacgtccattcgaaaaccgtcaacacccttgttcagccaccaggtcatcatcgtataaactgactctcgtaaggtcggattctcccagtttaaatcaggttgttttgttgaaaacgtgtgtaaataatactgctgggtctgctcatcatattgccatgctgaaccaccaaaagccgcatcccaattattgggcgcctttttgccgttacctgagcgccaaaagtagaaatcacgatattgattggtgcggtcctggcgactgcgtttgaaccatggatgctcatcagaggtatggttaacaaccaagtccatgatgatctttaagccccggtcatgggcggcttgcaatagttcatcaaaatcagccatagtgccaaagtcggccgcaatttgttgataatcactaatatcataaccattatcatcgttgggtgaacgataaatgggattgagccaaatgacgtcgattcctaattgctttaagtagtctaggtgggccgtgatcccctttaagtcaccaataccatcatgattggtatcttgaaaactccgtggatagacctgatagacaacggcttgttgccaccacttgattgttgctgccataattacgattaactccttagttacgcggtaaggcccttgatgagcttaactggtaacgtatattttgattccagtgtacaattcgcatcctcaatccgctgcaatagtagagaaaccagtaacgtgctaatatccgctaacggttgttctactgttgttaattcagaatgataatcacgtatgagcgccgtgccatcataaccaacaacgcgtaattgctcaggaaccgttaaggacagttgtcgcgcgacgttgagcactagtaaagcggtcaaatcatcactacaaaaaataccatcatactgatgttgtgtcataatcgtcttaatttccatcatcttcagcgcaggggtcaattcaaacggtaattcatggacatggggtgttagctgttgggcagtcaagtaggcttcatatccttcacggcgaccattcgttggcgaaccagcgtgtgacttaccagtaaaaatagccacgttagtcgcccccgcctgatgcaatgtctgggttgctagccagcccccctggtaattatccgaactaacgatgggaatattgtcggataagtaccggtcaaatgaaataatcggaagaccatattgttgatattcttcaatacctaaattgtgggcaccagcaataatcccgtcgacctgattagccatcaacatttgtaagtagtcgcgttctttttgcggatcatccgcactattacataaaatcaccttataatttttagcaaataagattttttcaatccgggacaccagttcaccaaagaacggattactaatatctgaaaagatgacgccaattaagcgcgtattctttccttgcagtgagcgtgccatattattcggctgataatgcagttctcgcatcgccgcgaaaactttttctttagtctgactactcaggtagccatggttattaataacccgagaaacggttgtcgctgagacccccgctagcttcgcaacatcatttaattttggtttcattgttatcgactccagtatgctctgattggcgccattcccagactttaccggtaactgccgtagtgtcaccttgaacgttaaggcgactcggggtagcgtttaagaagaaacggccggtcatcacggaatagccgttatcaatatagcattcaaagactgacacatctatgattagccggatttttatcgtcttatgggccgttaactcaacttgacgagtctgaccataatcttcagcaaacgaattccccgtatgccgccgatcaatcataacctgaccatggttggcatcaacagtcacctgcagctggccactttcctgctgatcagcaatgttaaccgtgaccgttttatcagcgggaaccgtcagtaagagttcaaagctgccattcaaagcggccaccgtcgcccgttgttgctcaaagactaggtcatgcgccgtcgtccgcaaatcatccaccgctgccactggattttgatagaggtgcccatctttaagcgttagttccttaactaagctcaaacaatgggcccaattttcacgatcagttggataggaaatttcaggtaacccaatccagctgacggctaacgcgcggccatccggcgcattgattgcctgcgtggcatacacgtcaaagccgtcatccaattgcgtcagggcgtggggttcagtgaattgtgcctgagctaggtccaattgatcggcaactaagtatatgttcggataaatattctgatacgggatcgttgcttgcgataacccttggggacagaacaataagacgggctgttgatcgatccagaccagatttggacactcaatcatataaccccgcgcatttgcgggaacgttcaactcgccttgacacgtccaggtggtcagatcctttgagaaataaaccaagatagcaccgatctcagtagtcgtctgcgcaccgatcagcgcgtagtagccgtggtcagtccggatcaagtccggatcacgaaacgaactcgtgtacccagccggagcatgcgcaattagtggccgggacagctttttaatgtgattatccgtgtccatccaggcacctaattgatacgattcacgttgccagtcggcagtacggacattacccgtatacataataaataactgatcatcaattggtagtgctgtacccgtgtacgcgccgtgtgagtcgtacggcgtatctggtcgaatcgctaagccctcatcatgccaatccaccaagttcttagaggtcacgtgttgccatgacttcagtccgtgtaccggaccgaacggaaagacttggtagaacaggtgccactgaccatcaaagtatgaaaagccacaggggtcatttaacaaacctgatgtaggctgaatatgatgttgcatccgccacttagactggcgtgcctgggcaacgagctgtggtagcttagttgctggccactgttcataaggggtataacgggttttacgattccatatcatgacgatgagctcctttttaacgttcgacttaattgttaccattataaaaccgcttacaccaatatgtcaatcgtttgacatttttatattatatttttatgtcagcgtttcaaattcggctttttaacaagattatcaagcaatccaattttgtatcaaacgcttgacatattttccagacttgttattattaggtctgtaaagcgcttgcattattaaaaataattttagactcagggagtgaattattatgaatcatcaagaagttgccgaccgcgtacttaatgcaattggtaaaaacaacattcaagccgccgcccactgtgcgacacgcctccgtttggtcatcaaggatgaatccaagattgatcaacaagccttagatgacgacgcggacgttaaggggaccttcgaaactaacggccaataccaaatcattattggccctggcgatgtcgataaagtctatgacgccttaatcgccaaaacaggtcttaaagaagcgacccccgatgacatcaaggcagttgccgctacgggtcaaaagaaaaatccattaatggacttcctcaaagtcttatctgatatttttattccaatcgtccctgcactagttgctgggggtctattaatggcactaaacaacgttttgactgccgagcatctttttatggcgaagtcagttgttgaagtttaccctggcctcaaaggtatcgccgaaatggttaacgcgatggctagtgcgccgtttactttcttgccaatcctcttaggattttcagcaacgaagcgcttcggtggcaacccctatctgggtgctacgatgggcatgatcatggtcttaccatcactagttaacggctatagcgttgcaacgaccatggctgccggcaagatggtttactggaacgtctttggtttacacgttgcacaagcaggctatcaaggccaagtgctccctgttttggccgttgcttatattttggctactttggagaagttcttccacaaacatatcaagggtgcatttgactttacgttcacgccaatgtttgcaattgtcatcactggctttctaactttcacaatcgtcggtcctgtcttacgaacggtgagcgacgcattaactaacggtttagtaggcttatataacacgactggttggattggcatgggcatctttggccttctctactcggccattgtcattactgggctccaccaaaccttcccggctattgaaacccagttattggctaacgtcgccaaaacgggaggttcttttatcttcccagtcgcctcaatggccaacattggacaaggtgccgctactttagccattttctttgccactaagagtcaaaagcaaaaagccttgacttcttcagccggggtctcagcgttactcggaattacggaacctgctattttcggggtcaacctcaagatgaaatttccatttgtctttgcagcgattgcctcaggaattgcttcagctttcttaggactattccacgttctgtccgtggcgatgggtcccgcatcagtcatcgggttcatttcgattgcttcaaagtcgattccagcattcatgctcagtgctgtcatctcgttcgtcgtcgcatttattccaacttttatctatgccaaacgaacactcggtgacgatcgtgatcaagtaaaatcaccagcaccaacgagtaccgtcatcaatgttaatgatgagattatcagtgcaccagtaacggggactagcgaaagtctcaaacaagttaacgaccaagttttctcagccgaaatcatggggaaaggcgccgcaatcgtgccaagcgctgatcaggtcgtcgcaccagctgacggggtcatcactgtcacttatgatagccatcatgcttatggcatcaaaacaactgctggtgccgaaattctgattcacttaggattagatacggtcaatttaaatggtgaacacttcactactaacgttcagaagggcgataccgttcatcaaggtgatctactcggaacgtttgacgtcgctgccttaaaagccgctaactatgatccaaccgtcatgctagtcgtcacaaatacggccaattacgctaatgttgaacgactcaaagtcacgaatgtccaagctggtgaaccgctcgttgcgttgactgaaccggcagctagctcagttgctgctacaactgtctaaactttattaggagaataaataagactacatttttaactacaggaggcacactatgcttttaggtgcaattgaagctggtggtacaaaatttgtttgtgccacgggcgctgaaaacgggcaagttagcgaccgaatttcgatccccacgacaacccccactgaaaccatgactgcggtagacgactattttacgactcatcccgttgacgcgattggtatcggttcatttggccccatcggcgttaatcccgatgatccgaaatatggttacattaccacgactcccaaacccggctggggtgacttcgactttttaggccatcttaaaagtcgattcaacatcccactctactggaccactgatgttaacgaagccgcttatggcgaatcaatgattggaatcgctaaggacgtccctaacagcatctacatgacgattggtaccggtgttggcgctggcgtcattagtcagaaccacatttttaatggtcgcactcatactgagcttggtcacatgcgactcaaccggttacctggggacgatttcaagtccaactgtccttaccatgacatctgtttagaaggtttagctgctgggccagcagttggaaaacgaacggggaaagctgggaaagatattcccgttgacgatccggtctggccaatcatcgctgactacatcgcacaggcatgtgtcaacctcaccgtcgccttcgcacctgataaaattattcttaacggtggtgttatgaatcaacggcagctctttcccatgattcgtgaaaagtttgccgcctatctaaatggctacgaagaagtcccaccactggataactatatcgttcccgctggactgggtaacaattctggcattgccggtggcctattgttagctcaggttgctttaaagaacgcttaacaccttgcaaaaaagtccgccgatacgcgtttaaacgtatcagcggacttttagtttacagtcaatttgtcattcggttaatgaatatatacggttaaaacagtgataaatccaaaaatcaccccgggaacatttgaaataataacgggccaatccttataagtcttgaaccagccgtaaccagtccataatatcccattaatcattgccacgagtggttgtagcggcgatactgggtcacctgagaaattcgaaatgatttgcggaatatacgacacgtacatggtagattgtaaaattaatccgacgctgttcggacaaaaaagatcagcttcccttaaaatggtgtttaccacaaacccatcttttaggagctgatcttttgtctagtataacctattccgaacgaattaaaatcgaaaccttttgtgaactagggctgtccaatatccaaatgggcgttcggctgaaccgatcaccgtcaacaatttcttatgaattagctcgatgtcaaccttatcaggctgaattagcacaaacagatgccgaatacaagcgatcacgatgtggtcggaaaactaagctgagcgatgagttaaagcaaaaaattctcaaccatttacgtctaagctggtcaccaggaatgattgctcacgaatttaaactagctactaaatctatttataattggctaaatcaggggagaattggtttctccttgaatgatctacctgaacatggcgtacgccaacggcgtaacgttgaccaacgatccaaatataatcaatctttggggcgatcaattgaacagcgtcccatgatgattaatcaacgtaatcgcatcggcgattttgaactagatacagtcgttggtcctcgtgggcatagtaagtctagtggtaataagtcaagaagataattgatataaatatcgtgtaattttacaaaattggcaacactaaactaagcctacttaaaattcataaaaattttagtaggtattccaaagatttgcgtgaataactacgttattccttcaacacactctttggtggtgtgtaaagttggtgattgcgtagtagcgcatcaaccaaacgcacaaattttctggcggttaaaacaatagctcggcggtgcttatttatcggggtttcggtatatttctttttataaaaagctgtgtattcaggtaagtgattttttaccgagttggcggcttcaactaagtaataacgtaaataatgattaccttgttttgttagtggtgtgacttctgactgataatttccagattgtttaactttccaggatagaccggcatatttggcgacttttgcttgatcatcaaatcgttcgatttgaccgacttcagctaagatacctgcggcataaaccttaccgattcctggcacactggttaagcattgatattcaggaattatttcaactagtttttcgatacctttatcaatttgtttaatactttgctgtaatgaacgcatttgaactaccaaggtactgagaataatatcaatcgactcattcattaatcgcggcaactgatagctatttttaatggcacgctgaatggttttaaccagtttttcaggatttttaaagttactgcggccaacattttgaatcaattggacgaagtcctctagtggtaaattggctaattcatctaatgagtagttttcagtcattaaatgtacaattgtggcgctaaaaatgccggtagattctgattttaattccttactaagcgtattacatttataagttaagttttctaagaaatgttgtttaaccgttactaattcggtaactagttgatatctagtacgggttaaacgttgaagtgccatatatttttcttctttgataggtgacgttgtaaaacgttgaattcgtaagtagtcagcaattcgcatggcatcattggtatcagttttgtcttcatcgaagacacgagaatattgcttgattttaaatgggttttcaacagtgactaccgttggtagtgcatttaagtctgcatcttcttggaaaaacatagctggatgaaaactatatagtgatgttgattccataccaatcacaatctgttcaaatgatacttctgcgtgatgttttaaaattaaggctttaatttcagaagcaccatttaaatcgttagcaacacttaaacgatttaggattgataagttactatcatcggtcataaaacaagcatcaatcttttcagaactaatatctaaaccaacaaataatttcacaggaaggacctcctttcgagagttatttggaacttgctttgatactgcgggattccccagaaaatctttacacagctacaacctcgcgtaacagaattttgaccaattggacttatgccgccttcaaactactacattgaagataagcctgattgaaaacagctagtgagttgggagagagcgtaaagactcgggtaacggacttactaaagtagagttaactacaggagtttttagcaaattcccgatagatccattccatggtcctattatattctgaagaatcccgcagtatcaaagtaataattaaattttattgtaagccaacggcttataaatatatcttacgaggcagttttattaactttaatcgatcgcaaatcacggttcctttgggcataccggttaaaagatcggacgacagcgactgttaatgaagcactaactaagttcctaaccacttttaatggtccggtgtacagctttactgtggaccgtggcactgagtttagtgggctagtatcacttgaatcacaatatggtattaagacctattactgccatgcttatacgccagctgaacgtggtagtaatgaacgctttaatcggaatttacgttatttttatcctaaagggactcgttttgagcacattagtgctcaagatttaacgacgacgttactccaaattaaccagcgaccgcttaaaatactcgaatggcaaacaccgtatcaggttatgctgacaaatttgtccaaaaattcggattaaatttgcaatctaccaaatagcattcttatcctcctttgaactacctcagtttgtttaatattagctaacagtttatctttaaatgacaaaaaaagctctgacaaatgagtcaactcatttgtcagagctttttcggctatggactatatcaaaataactagacgcttattcgccagtaccttctagttgtccttcttgcttaatagcatcttctttagttgtttctgtaaccccgtgttcatgtttgactggtgaatagatcgagtagcacttcataactttatcaccagcattaataacattatgccaagtgttatcgggaacaacaactgcttcaccaggatagaccttgcgatcaactgtcagcttgttcttatctttacccatttggacatgaccgaccccatcaactagatagataaattgatcattgccatgatgaatctccattccgatatcgccgccatgcggtggaattgccatcaaagtaacttgaaaatgatcacctgtccataacgtcgtccgatagttgtcattttgcatggcagcttctctcaaatcaattgcaaatggagcagcaccataatcttttaattcgatttttttcttctgcatcattcatgacccctttcgagttctattatagcacaaataaataaaggtagacctaatatgctcctatcctagtatttggtacataaatttctgaacagttgtgccataattaataaaacaagataggagcattccaatgaaacgatatcaagatgattttaaagccagcattgtgaagatgcatcgtgaagagaaaagatctattcgctcgctttccgaggaatacggtgtttctccagccgcaattcataactgggttaaaggcgctaaatcagttgagctagaagacggtactgaagtaacgtccaaagaattcaaacaacttcaaaaggaaaatcagcgattaaaggaggaactcgaaattttaaaagctgcggcggtgttactgggaaagcattaggacgaattaattgccttgtcttcatagaagatcagttattgcgacaccgcttatcaattattctttcggcactgaaattaccgcgcagcacctattaccattggaaaagatatcaacctagtcaacacgaacgtgttgataatcaactcaaagaaaaaattaaattgatttgggaaaataattatcgtgcctatggttatccacgaataacgatggtgcttcgcaagtcaggcatctgtgttgggtcaaaacgaattttacgattaatgagggaaatggagattcactctttaatgaatcggcgatttaaaaaacctggcactcatgtggatcattcacaacgccccaatttaatcaagcaccagcccaatgcaaggatatggcgtgctgacattacttatttggaattacgtccaggaacctgggtttatctcagttctatttacgaaccaaaggttcatcaagttcttgctttcaagattggtcgtcagatggaggcgacgttagttgtagaaacgattaatcaggcgcttgaatatcatcaaaagccacaatattttcactctgacatgggttcacagtacaccagcaacgaagttgaaactttacttgaacggcatcagattagccactcatactcaaaacaaggttatccttatgataatgggccaattgaagcttttcactcattgttgaagagagagtttgcctttcaaacaactttttccaattttgaggacttggtaatccgaacctcaaattacatcagttggtttaattccgacagaattagaacgagtgtttagaaaaagatgtgccatttattgacataggagcacctagccaataaatataatagtcattctattcttcctattctttctttttttaaatcggatactcttcttattgctatatttaaatagtattctgaattatctattccgatcgtttttaccccattttttgcacctgcaaccgcagttgttcctgaacccacgaaaggatctaataatatcatcccagtgtcagtacttgcttggaccatcctatcaataacagccaatggtttttgagttggatgtcttccgaatcgacgctcactattattaatagtgggcgtagtccaaacatccctcatctgcctactatgatttaattctttcattaaatcataattaaagaattgttttccactctctttttttgcccaaataatagtttcagttgaatgtgtgaacatcctcttacttaaattaggagctgggttggacttttgccaagtaatattatttaatatcttaaatccatattttggcaataaataccctaatatgtatatattatgcatcgacccaaatacccatattgtgccatctttttttaaaattcgatccgcagatcgaataagtcttgtataaaatacctcaggctttacatcattaattttatcccactctcctttgttgacgctaaccatcttacctccactattcgaaaaacccccgttacttaaaaagtatggaggatcagcaataattacatccactgaattcgaggggaatctttgcatacactcaaacgtatcactacagatcaatttaactagctcatctttgtaaacttgtttcataataatcaccacctattaaacctatacacattactgtttcatttttttcacacttaagaaatttatttttgaggtgccctgtcttaccaatactattaaagaacattagaatttaaatgaagaaacaaagtccttcaggtctcgaataacactattaaatccccctattttggtgtatcattatacaaacatacgttttatatagaggtgaaaaaaatgaataagaacccacttgttaagccatttgtgaagtgggctggtggtaaacgtcaattaatcccccaaataacaaagtatatgccaaaaaaatttggaagatactacgaaccttttataggtggaggagctgtattcttcgaactacaatatggaaaatctacaattaatgactttaatactgaactcttccttgcatataatgctgtcagagataatatcgacgaattaattagcaacttaaaaattcacgaagcaaataccagtagcgactattattatgaagttcgtgagtgggatagaaatggaattattgataccaaatcaaatgttgaacgtgctgctcgttttatatttttaaataaaaccggatttaacggactattcagagttaatagtcaaaatcaaattaacacgccctatggtaaatataaaaatccagcaatcgtcaacgaaccagttctaagagccgtaagtaaatttttaaataaatcaactatcaaaattatcaatggtgattttgaagatgctgttaagggagcacgacggggcgattttgtatattttgatcctccctatgctccaatggttaatgatcgacaaagctttgtaggctacacactaaatggttttggcgcagatgaacaagaacgtttacgagatcttgtagatcgtctgactgccaaaggtgttaaagtgatgctcagtaactcctctgtcccttatatccatgaaatttatgctgattataaagatacaactgtaattgtgccggcatctcgcagtataaattcaaaagcaacaggcagaggtaaggtggatgaagttttaatcatgaactataactaccttgatgaaaattaatctaatagagggattcttatgacaaaagcaaatgacgcttggactcaactatttgataaatacaatattcttgaacaaatagacgctgatggtgtctttaatatctccgctacacaaatcaaagaattctacgagcctagactcatcacaaaatatgattggtcatctagtttacctgacttatttaagaaaaataaattagttatattaccttcctcacgtggaacatatacaatcggtagatttaaagcctaccagaagctgaattatgagaatatacgaccaatcgttaaaacactcccctcttgggtaagtacttgggactcattcggtatcacatcagaagcagtagctttaaatgtcgcaaaagcctcaggaatgatcgaccacatattaatgagcgatcaaaacttccctgctatcgacaccataacgggccgcttaaaatctggtgatttaaattataaaattgagcaaaaaaatggctccttatatgatttccatgttgccaatgcccaagtagagattgacgcaggcttcgagagccttgataaactagccattgttgaggcaaaaactcacatacctgaagatttcattattcgtcaactttatcatccttatcgtgtctacaatgctttgggaacacaaaaaccagtcattcctttatatttcacttatgctgatgagatatataccttttatcaatatgagttcactaatgtaaacaattactcctctattaaaaaagttcgacaatactcttttatattaaatcaaactctaagcttaaatttagatgtagtaaaacagatatctgtccaaagccccatgcatccagaatcaacagaaatcgtgtaccctcaagctaatacgtttcaaacagttttagacatgatgcagtatttagctactccaatcgataaaaatgatcttgctgaaaaattcaactttgatgttcggcaaagtgattactatgcaaattcattaagattcttgggattagcacaaaaagaacatcgtaagtacgtcctgacagatctaggtcaatcaattaatagtttacctaattccgacttccgtaacgaaaaaatcattagacagatactcagtcatatcacttttaaactggtatttgattcttatttaaaaaataatggtgaatctgacgatgcttatattgatagtgtactcgcagaatatgtacccaatattagtggaaaaactattcctcgtagacgtagtacagtcaagcaatggattagttggattttttcagtaatctactaacactcattaatcaaaaaaagaaggtctcaaacaaatcatatccgatttgtttgagaccttctttctattattccttcgtatacttcatcccacctacaagcatgtctgttagcgcattacccgtagattcgattttgaaggattttttgtctttagcaagttcggctgtgatttcggtgtcattgagtttaattttcaagtcgccgtctttgatttcgtaagtacctttgccggttttttgattgctttgatactctgtaactgtgtcatctttgaagacaaaagtatcttttgaaacgcctaagttagcggtgtagcgacctgctaattatttttgtacagttaaactagcggattttcatccaccgccggcaaatatctgcccgccaatccggcaattaccgttagcaagccaacgctaatcaggccggccaagtgaatcaactgactggttgtgtcagacattgcgacgctgccactgatttgggcaatcacggccgttatgtcttgttgccgcattacggctaggcccatcaagccggtgatcaagataaattgcattaggatactaccgagatacgtattccgatatttaataattaaggtttgggccggcgtcgtgacgccggtgtaataagcgcgatgatttaaaagaatgctgttggcactgccaaagaaactaatcaataagatgcctaataaaattagatgtggcgtaatcatcaaccacgcaccagcaacaaatcctagtaattggacttttaagtctgataacttcgaaaagcgcccttgcacgctctttctaataacttgggctaaaatcatccctgcaccgtaagtcacgtaggcgcctatcatcaaactctgattttgaattgcgacaaaaatatagagcattaagaatgtttcaaacgccccgttaattaaagccgcaaccaaaagccaacccggcatcttcgttttagtgccgcgcgtgatgatcacccgcaagattagcgcgactaacccaatgacagcgactgtgattaataaccagacaaatttagcttcaaaaaggcgcagatatcttagcgcaaacgccatcgcggttgcccagacaaatagttccaagttattaagcgatttggtttgttcgacgaacaccgattcatcaagttgcttcacaaacggttcgaagcgttgcatgccaatgaaaccaatcaatacaaatagcatgataacaataaagactaaccgatatgaaaaatgactagcgatggtcaacagaccaaccgttattaggctaaaagccaataacgttttaatttcagtgcccataaggtgccatttccaaaccactcgctcgtgataataaacgctctcataggttggcatgatcacactggcactggcgcccaggataaaggccgccatgtccgttaaatacagccaaggcgaaatagccaatagcaataaggcgccagcagctagcagcatactgatactagttattttaaatgaattctgcacgtggcctagactattcacgaataataagccagttttcaacgcggtatagaataagatatacggcatataagacgccactgactgcccgctatgaatcatggttaagccaattaaagggagaatttgaattaacttcgccaccgcaaagacaatcccttgtttaattttttcactagtcgctaattgttgcccatttgtcatcaatcatccctactttcattgattagacggtaccttatattgcgtctgatttcaaagaagtaccgttaaaagcctaaattgattgcacaaaaaaaacaccgtaagtcgtcgaaacgacttgcggtgttttgattagctctttattcccattccactgttgaaggtggcttgctcgtaatatcgtacacgatgcggttgacgtgatcgacttcgttaacgattcgcacagaaaccttttgcaagatatcccatggaatccgtgagaagtcagctgtcatgccgtcgattgagttaacggcacgaatcccaactgtgtaatcgtatgtccggccatcacccatgacacccacactacggatgcctggtaagactgtgaagtattgccatacggttttatctaaaccagcgagtgcaaattcttcacgcagaattaaatcactatcgcggacaatcttcaatttatcttcagtcacttcgccaaggacccgaatcccaaggccaggacctgggaatggttggcgccatacgagttcatatggcatgcctagtttttcaccaaggtcacggacttcatctttaaataatgtatttaaaggttcaattaagctaaattgcatgtcttctggtaaaccaccaacgttatgatgtgatttgatggttgtcgcagtacttgtaccactttcgataatgtcagtgtataaagtcccttgcgctaagaaatcaattccgtttaacttagttgcttcttcgtcgaacacttgaataaattcgttaccaataatcttccgtttcttttctgggtcagaaacgccagcgagtttactcatgaaacggtctttagcgtccacttggatgatgttcaacccaaatttaccgccaagactttccatcacttgttccacttcgccttttctgagtaagccgtggtcaacaaagatgctgaccaattggtcgccgattgcgcggtgtaataacacaccaacaacagatgaatcaacaccacctgaaagaccaagaaggactttcttgtcaccgacttgttcacgaatcttagcgatttgcatgtcgatgaagtcgttcattgtccagttatcttgggcaccacagacaccaaatgcaaagttcttcaaaatatcgttcccgaattcagtattccgcacttcggtatggaattgaatcccataaatccgacgttcacggttttcgatggcggtgaaaggtgtattatcactttcagcaaccgttacgaaaccttctggaatcgctgtgactttgtcgccatgactcatccacaccgtttgtttttcaggaagacctttgaataagtcactgtctttgtcagtgactgtaatttcagccttaccatattcacgttctgttgatgcttcaacattcccgccgtttttaaaactgatcaactgcatcccgtaacaaatcccgagaattggaatccctagttcaaaaatttcggggtcaactgaaaaggcaccatcatcgtaaacactcattgggccaccagagaaaataattcccttaggggcgatcttcttgatttctgctgctgttgtcgtgttaggcaacaattcagagaaaatcccgaattcacggatacgacgtgtaatcaattgattatactgactaccgtaatctaatacgataatcttatcgaaatcttgcatgtccttttggaccaaacaactcactcctctttttaaaaagtaatttggtgtgaacaagtaacaccaaattgctagattcataacactaagtcaaactataatgtatctattttactgattaataatgaaaacgtcaatggattgacggccttcctgtgaaaaaactcattctattattaatatttacgtaggaataccttatcaatcacgtgatgtttcgttttatgcaaaatgacatcggcacgattacgcgttggtaagatatattcgtttaaattttgtaaattaatgtcacgccatacccgccgcgccatcttgaatgcactctgtcggtcactgatggcgtatggataatagtagttggtcggatcatctttggctaaatcgagtaatagatcgaaacgttcaaggaaccacttcttgattaagtcggcttgcgcatcgacataaattgaaaagtcgaagaagtcactgacgtaaatctgctcagttgatggcaactgtagtacgttaattccttcaacaattaaaatatctggatcgtcaatcacgtcgaactcgtcgggcacaatgtcgtaaatctgatgtgaatatttcggtgctttgactggtccaacattatttttgaccgcattcataaattgaattagatgcggcatatcataactttcgggaaagccttttttatcaagaattcctttttgtttcagcgtggctgtcggatataagaacccatcagtcgtaatcatttgaaccttcttatccgggtaggcccggctgagaaggagttgcaacaagcgcgccgtcgtactcttgccaaccgcgacgctcccagcgatgccaatgacaaatggtgtcctatgtggcttaatctctagaaattcagatttttcggcctggcgtatctggtactgttcatagtgcatctgtatcagatgccgtaatggcaaataaatatcactcacatccgcaagtgaaatccgatcattcaatccccgaatctgttccagctccgtgtccgtgatgccagtatacgcgtcaccgcggccatgaaaaacccgccactcatcacgcgagatttcataatatttcatctcgttcttcatccgacaatcctccaatactaaacgcatccattttaacattaaaaacagagtgcgtcatcttgcgattatatttcgaggattagtctagtaccgtgaataagcgccttaaggcgattgtttgcggtgcgtaactaaccacaggaatatgcaagatgaaagcacgtttcaaaacagagtgcgtcaccaatcggttagcttttgagcatttgcctagtattgtgaataatcagcttgtctgattgtttgcaatgcgtagcaaagcacaaaaagcgattggtgtaagcacgttttcgctagagtgcgtcatcttgcgattatatttcgaggattagtctagtaccgtgaataagcgctatttagtagctcgccttttttctttatgaatgattatgatcagcatcccaaagttaagcaaactaatcaccgtccctattctctgaatcgtagttgttcgataataaacggtgattctaccagttcccttcaacgcaacttgtgttaacccagttcgtttattcatctgcattggtaatcgctgatgatggttgagttcggcaacgtaccctttgtaataaataaaggggacttcaacaactgctttttgatccgtcagtgtcctgaaatcaaactgataacggccccatgtatgccgtacatttgtaatttttattttatgcggctgatacttaacgacctgttttttatgtcgcaaaattttctggtagtcggtttgagcaggtaaatactcatgtccggccccaatgtaataagggttgggcgtgttataggcagcattcgttctaaagcgccaactttggctttgaatactattcgtagagtagatgacatttcctgcgcccaacaacagaattagcagataaaagtagtacttattctttaataaatgacattcatccttagcaactaaataactcacaattgccgtaataatggcaaaaaaacgccacgggaactgaatcgtattgataattgtatgatccaacaaatgccacggcataatcggcgtcgcagctatgaatagccccaacgcaatcccaattaaatcacggtcgtttttggaatagtaaaatagaccacacgcgatgcctaatccgagtagaatcgtgataccgacattcactgtattcgcatgaaaaacagcattcgttaatgaattaacaacaatgtctttaaagggtaatgtgcggtcagataaaaaggccaggggttgtgcggttacttgaaaaatcgtggttgccatttgttctccaaccgctaagaaataacgccctaataaaccgattgctaataagccagcagcaatgagatactttaaacttttattttggtagaatctcttgagatttaataaggtataaataatgatgacaatgcccatcatttcaacagaaatcatatgactataaccaatagctgcatccctattgataacagataccaataccggtgctcacctcaccaatggcttgccgattaactaaatctgaaaaacgataaatactaagaccgtacatcaaagagaatattaatgcttgcttcttattaaaatccgctaattttcctgaaatatatgtgattaaaaacgtactaaaattaatcgcaattgcaaatacaataaaactctctttgattgatagtcctactactctcagagtagctggtaagtagagaaaagcatctgggtaaaaaagacctgccgcatagcccattccgccgatgaaaaagtaactgattctcggaaaccactctccctgtttaatcgaaagtgccaaattctcaatgcggtgatagtcagaaccagacaggattttattgggctgtaaatagacgattgcaaccatcgcaatacttaatagtccaaaaaataatagggttactgttaaggcatgtcgcttgtaaaaatactttaatctttgcatcatacactcctcataaaaatactttagtatcgataattgccattccagcatcagtctaagggggacgatcgaattataagtaagtataaataatgtaataatggacattatttatatataaactttaacgaatagaatcggtcaatgtacaatattttgtttggcaattaataagtaatccataagctaagaaagcgataagacgcaaaaaagcgggctaaataattattagcccgctttaaaatccattaaatttataaataaacattttaattaaaagcgctttattaaaatattcattgtccattttttcgcgattacacttttcatccaatcaaaaaacgcccgcctttcagcgcgcgttttttctatttaattaacgtgtaatcatccgcatccacattatcaatcaatggtgacatgccacctgttgctaataaagtgaggcgatgcatcgctctcgaacagatcgtgtagagcaattgccgttgatcttcatgattgtagttggttgcactgacttgccagccgataatcgcatcgaattccaatcctttggctaagaaacttggaacgactaacgtacccgctgccaaacgttgattttcggaacgaattaaagtgacttttgtgccactggctttcaacttagctgttagttcttgggcttgcaccaatgtcttggtgataatcgccgtcgttaacttatctgcttcatttttagcgagttgcgcattcacatcagcgaccaattgatcttcgctttgacgcacaatcaagtttggcttgtcgccttcacggttgaaagcttcaattttttgaccgccctttaagagccctttggtaaagtcagtgacttgttcagttgaccgatatgaacgcgtcaattgaacgaccttcgtattttgcgcattaaagagttgttgcacttgttgtaataggttcgtgctgttttctttggtgaaaatcgcttggttcaaatcaccgagtaacgtgaagcgcgccttagggaagtgcatcttcaagaaggccaattcgtatggtgtgtaatcttggatttcatcgataaagacaaagcgcatgtcgcgttcgccgtgcttaccggtcattaaatcataaagatgcaagtaaggtgtcacatctgataacgtcatttgtttggcctttaaattagcgacaaaatcagtcacatgatcattccagatttctggtgtcaggtcaaattcagccaaatcaaccaattgcggcacaacccgcatgaagtggacgtattgtgcttgaatactcaagaagcgattgcgttgaattcctttttgaacgggtttgaaagccttcaaaacgatttgtttagcgatatatttactttccgcttcaccagtcttaaagtctttgcccgccataatttcgcggagttcttcatcactcaagttttcagcgcgttctgtcacccagtccgccttggtttcgtggtcgactttatggctcaaactgcgcaataaactttccttcgtcgcgtctagccggtttcctaagtgatagttttcgttgaaacggtaatagacgtcgctgattttttccttactaatcaagaccttcccgttcactttcaagtcacggaagcgcatatcacctttttcaagatgcgctgcgtaacgtttaactgctttatagaagactaggctttctttcaaacggctaatccgcgcatcagtttccgtgattggtgtttcgaattggtcaaataaactctgaacagcaaggttcggcaaacgccgtgcaacatattgatagtaagtcatttgaatcatgttttgttcgccaagttcaggcaacacgtcagcgatataatcgttgaacaattggttcggcgagaacatgatcacttgactggaatccaggttaccccgataccggtaaagtaggaaggcaatccgttgtaaaatcgcggatgttttcccagaaccagcggccccttgcacgaacaataagtccgcgtcagtgttccggatgatttgattttgttcccgttgaatggtcgtcacgatactcttcatttgtgtatcagacttttcgcccaatacttccagtaacatttggtcaccaattgtttcttgcgtatcaaataacgccttaatttggccatcttcaattaagaattgacgtttcaaagaaatattgacgtcttgcgggccgtcaggcgtttggtacgtaacttcaccagtcttcccttcatagtaaattgatgaaataggtgcccgccagtcataaatcaagaaatgatcttcgcgatcggtgaatgaccctagcccaatataaatggactcagactttggttcacccttttctttaaaatcaatccgcgcgaaataaggggttttttccattttttgtaaagtctcaagttgccgggaagattgttgccaagaattattccgttcttgcaacatttgccgttgttgttcgattgagactgccgtttcagtcattgctgaatcattattgaaattcaaccgtacatcattaaagaagtttgcgttaatttctttttcttctgatttagcccgttcaacggcgccttcgaagtgcttttcggcgtttttaattaaaccgacaatctcggttaaacggcgttgttctaatgatttttgttcgtcagtcaaagcagatgtcccccgatttctaaataaacagttctacaagtttaacactaaattcacaagagtgcgacgataggcgcttatattttgagcattaactggatttaccgaattggcgatgcaatcgtcggttcggtaaatttggttaagcgtagaaatatgcctatcggagcacgtttagagtgcgtttgaaacggtttaactttcgaggattagcctaatcagggaaataagcgatgtagtcgattgttttcctgatgtagctaagcggaaaaagttatttgctaaagcacgtttcacgatcttcccacaaaaaagccggccgctgcaaccaccagccctaacccgtaggttaatagcagataaccaaagaaaatatggtaacggcggcggaaccacagctgactcaattcgctattgaacgttgagaaagtcgtgtagccacccaagaccccgacgcccaaaaagagcgtccacgtttgatccaattgtgccccggtcacccagcctaagcaaaagctccccgttaaattaattaaaaaggtgattaatggatattcgctggcaatctgcgttccaagacgggttaattgataccgcaaaatagcgccgattgccgcgcccaatccgacaattaataacgtcatcattttagcacctgcgactttccttgccgatcgagcagccaaactgcccagtaatctgccactaaacttaagcagacaccgccaatcaaactaatcccgatatacaggctaaatggccaccattgattggccaccaataacttcaatgcatccacgctaaaactagaaaaagtcgtgaaggcgccgaaaaagcccgtgcccattgcaagtgccagcgtatcgctgatctgataacgaaccacgatgtaacgcattaaaaaaggaagacaaaacgccccgattaaattcacacacaaagtgccatacggaaaccctgctgcttggtgcaatccgagcccaattgcatagcgtaaaatcccgccaaaaaaggcaaaaattccaaccgcgagactttcttttatcttcattttagatcgccccctttttaatatcgtagcatctattttacagaagttattaccaattgtaaattagttgtagatattaactagcgataatgccaactttttaataataatttaatcactaacgaattatcaacaaaatcgataatattagcgccaatatataaaaagccaattttacgaacccgtgctgttgctcggaagctattcggctttgacatgctttagtacccatctagctatcaaagccaacttcctgtgcacagctgtggcccgcaaacagtcggctacaccgcctatttacgaacccgtgctgttgctcggaagctattcggctttgacatgctttagtaggttagtgtatgctctacacaactttattgagcattgaaaggatcttttttatgacaagcttagcgctcgtaatcgttctattggcggctttaatgacgccgttactcatggcaaaatttaagatttcttatttaccaaccgccgttgcggaaattttggtcgggattttactcggacaaagtggcttccacctcatctcaaccacccccacactgacggaactttcatcattgggtgtgaccgtcttaattttcttaagcgggatggaaatcgactttgaactctttaaaaagcaacccaccacagctaaatctggcgttaaaacaccgctgacgcccttacaactggcagtcggtagttttacgctgatcctattaagttcgctaggactcgccagtttattggcatggagtgggttgttcaccgatattggactcgcaacaattctcttttcaaccatcgcgttaggggtcgtcatcgccgcgttgaaagaaaaagaactcctcagccagccgcttggccaaacaattctgttaattgccgtcctcggggaaatcgtcccgctgatttcgttaacaatttatgccgccctcaataatcctggttctaagagtctgtggttactatcactaattttcttagccgcgatcttcttattgatgcgttttaaaactgtttatcacttctttgagcggattgataagtcaacgactcaactcgatattcgtttagcctttttcttaatcatcacacttgtatcgattgccgaagaagtcggtgccgaaagtattttgggcgctttcttagccggcatggtcatgaaacttttacgcccccgtgaagagacgcaagataaattaacatcaatcggctacggctttttcattcccatcttcttcattatgaccggtgcaaaactcaacatccccgcgctcttacgtgatcctaaatcactgaccctgattccctttttcttcatcagtttcatgggcgccaaagttttgatttacttcgtcttaaaacggcgcttcaaagtcaccaacgccctcgccgggactttcctcagttcgacgaccatcacgttggtcttacccattttgacggtcggtctcaacttgaaggttatcacgacacagcaatccggcgctttcacaattgcagcggtgattagctgtattcttggtccgattctgttcaatcgattctacttaccaacgcctgaagagatgccgcgcaaacgtgttaacttcatcggcgccaacatcatgacaattccaatcgcccaacagttatccaaaggtctgtacacaagcgaattatttaccaataacgaacaaaattatcaaatctaccatagccaagccaacctcgaactcttgcctgacttggcaccagccaccttaactgacgcggccgtcttcgatacagatatcctggtcttaggctatttaaataatgagcaaaattatcaacttgcccaacaagcgattcaggccaaagtaccgcggatcatcgcccgctttgaatttaagaatatctcggacgatcaatacgatgaacttaaagaacatggcgttgaaatttttaacacttacgaagcaaatatcagtctgttgcgaagtttaatcgagactccatctaccttacaaatcattgataacaccgatgccgggctcttcgaagtcacggttaaaaatcggcgcttcaccgggattcaactttctaatctcccatttgtggaccaagtcacaattagtcgaatttaccgcgataagcaactgatcatgccgcatggtgacacgcaaatccatctcaatgatcacctcattctaacggggaataaacaggctgttcctgccattcgacgccaattagaaacgctcaactaaatcatgttgaccctcgcacattctctctaataggtttataatgaaactatcataattaaaggatggtgcagatatgaaacaaggaacaacaatcctcacattggataatggttaccatttatggactaatacgcaaggaacaggcgacattcatttactctgcttacacggtggccctggtggtaatcacgaatactgggaaaacttcggtaaggaattagctgatcttggtgtacaagtacacatgtacgaccaacttggttcattttattctgatcaacctgattactcacaaccaggcaatgaccaattattaacatatgattacttcttagatgaagttgaagaagtccgtcaaaaactgggcatcgacaacttctacttaatcggccaatcatggggtggcgcattggtccaaatgtacgctgctaaatatggccaacacttaaaaggtgccatcatctcgagtatggtcgatgaaattgacgaatatgtcacaaacatcaacaaaattcgtgaagacatcatgacccctgaacaattgaaattcatgcaagactgtgaagctaagaatgattacgacaacgatgaataccaagcacttgttgacaagttaaacgctggttacgttgatcgcaaacaaccacttgcaatctcacatttaatcccaacaatggcaaccgacgtttatggcgtcttccaaggtgataatgaattcgttgtgactgggaaattaaaggattggcatttccgtgaccaactccacaagattactgtcccaacgttaatcacatttggtgaacacgaaaccatgccaatcgcaaccgctaagatcatggctgaaaagattccccatgctcgcttagtgacaacgccaaatggtggtcaccatcacatgattgataacgcacccgtttacttcgatcacttgaagactttcatcaaagacgtagaaaatggcaactttaacgattaaataaaaaaagccgcgcacaaatttaaatttgtgcgcggctttttttgacctaatcaataatatctgaattaggttcccatttatccagtgtatcgaataagtggtttgtttgtgcgaataattgagaaaggtctgcattgccgtcatctttaaaatgtttaaagaataagtagaaatcgacttccaattgatcaaccattcgtaatccttgctcattcaatgaaatgaatactttacgttggtccatttcatcactgcgatttttaacaattaagtgttttctgaataaaacattaattttacgtgaaattgctgggcctgaaagatcaaaggattccgataatttcgccacttcaatattggggtttaatttgacctctctgagaatcaaaaattgatcgtatgtcaagtcgtgcgtgacagttaactgatttagcttattgtaaatttggccaatttgcagataccattcgttgaatcgatcaacaaggttactatccgtttctggttgcatcgaaccactcctttacataaacactaaatgtggttattaagtgttactagtcaaaaataacacaaaatgtataaaattaaaagatttatgcttaaaatattaataaatattgataaagttatttattagtatcttttaaaatttattctctcttaatgataattgcaattgattataattcaattgttattattaccattaaaaattataaatgcatataaccgttttgcaaaaaatatggaatgaccctgcacaccatttttatctatgctagaatgaaggtactaaaagctattgttggagggttacgatatgaaacgaatcacactttatttagtgcgtcacggtcaaacattctttaaccgttataaccggatgcaaggttggtcagactcaccacttactccgaaagggattgcagatgccgaacgcgctggcaaagaattagcgaaagttaattttgctcaagcttattctagtgaccgcagtcgcgcaatggacaccgctaaaattattctccataagaatttctaccttgatactccatatgctatcacaccgcacttccgcgaagaattctacggctattttgaaggtgaagattcacccaaagcgtggtacatggcaggtgccagtcatgatgccaaaaccttccaagaaatcatcaccaaatactcactcgatgcctctaaagatttcatgaaagaagctgatcccttccacgatgctgaagatgccgctgaatattgggcccgcgtcggtaaaggtttcaaacaacttcgtgctgaatgttctgacggtgataaagtcttgatggtcagtcatggcacaaccattcgcagtattgttggcaagtttggtaacgaccaattcgatgttaccgttagtccaatgaacggtagtattactaaagttattttaacagacgaaggcgttactgttgaaagttacaatcaattaacccttcaatagtatcaaaacgataattgatgtatgaatattcattgaatatagagctgggcaatattattctgactgttcagctttttttgtgggcaataattcatgccgttcaataataatacgcgcttcaaatgacagtttcggcagtcttctttggctttttttgtaggtaaaatgctcaccacaattgtagctaagcaagttaaaaactaatccagcgtggtatacgcctcttaatgacatcagtgtaacaagtagcgtctagagaaacaacttcgacctcatctaaaaagagccccctttaatctcgaagttcagattaaagggggcttttttagactgattcctatgttttaaactgtttcaaccatctactatttaacttccttcaacacaattcctttgtagagccatgtagtgagcaagtagtagattgcgtagagaataatgaaaattgaaaatggaatccagagatcattatatggatcaatcataatcaatttgaacaattgaagaccaaagaggacatggatgacgccgacgatacctggtaagaggaataagaccccaatttctttggcaatggattgttgcaatagattgcgacgcgtcccgattttagccaacattgtgtagcgtttaacatcactagctgccccagataaaatcttgaacatcaagcaacttgctaacatcgctaagaatgcaatcccgaggaagaagcccataaattcgagcccactgaacatgctgttcgctaacttatagttagcatacttgctactatccattgtagccccttgacctttagccaattcaggatttgcaatcacttgttgtgcgtgaatttttttgataacgggtaaattaaccgcaaagtctttgacccgatatgttttaacttgcgtggttgcgcctgccacttgattaaattcagcgtcagagacgactttaacgtccttactagattgacttggcacttgaattgcgcgcaaggatgaagaatcgccgttttgaatctcactgagtttcaccggtttaaccccttttgcgcgggcgacaccattcccattaccaaactgaatggccatgattggtgacttttcaagttgtgctgtccgatagtagacagttttcgcatcttctttaacatcgtaattagcagtcgccttcacaccctttaaatcttttgtgaggcgcaatgcttcttggttcggttgatttaaaacaacgtcgtaaggcgccattgtttctgccatttctggaatttcactttgatagccaatcccaactgtaattgcgcctagtgccaatgcaaataacatcgccaccaatgcgagcatcttggtgtaatccttaatgcggaagctcaattgcgctaacgtaaaattatttaaaccacgattacgaatcttgctgttacgtttgagcaacgtaatcaaccagccgaaaagggcattaaacaagaagtacgtcccgagcacaattgtcactaatgccacaactaagcccataatttggaacgttgcgactttaatcatcatatagtaaccaacagctaagaaaagtaagcccaagacaatttgtacaatacggcttaatttattttgtgaaacgcgatttggttgttgatcatcgtgtaagagttgtaaaactggtgttttcaaaagttggaattgattaactaccgctgcaataatgaacaagataatgaagaaaatcaaagttactaacactgcaggtaagtaaaatggtgaaaaatgcttaatctgaatatccatttgagacaataacagattgctaacaatttgggttaatccgaccccgagcgccgttccaatgagagtagcagctgtcccaatcactaatgtttcagcagcaattagttgggcaattttgcggccttttgcgccgagcatcataaacatcccgtaatctcgacgccgcatgctcattaagaaattattcgcataaataatgtagactaatgtgataatccctaataaaacagacccgatttggaaaataatgcccgccatgctaattggcgagttactcgtaacgaaacctttgttagttgccagtgcttcgaacatgtaaaaaatggcacttgccataattagaccggaaaaaagcactaaatagtctttcaaacggcctttaatgccggttaatgataacttcaataacatatttagacttcctcctaatggttaaatgtgcctaatgtatctaaaatttcttgataaaaggcttcccgactcttatcgccgtgaacgagttcttggccgatttgaccatctttaataaacaagattcgttgacaataactagctgaaaatggatcatgcgttaccaataagattgaaacgcgttgttcttcgttcagctgagccattgtatccaataattccttggcactctttgaatcgagcgcacccgttggttcgtctccgaataaaatagctggattatggactaaagcccgcgcagcggcgacccgttgtttttgaccacctgataattcggttggatatttgtttaataaactatcgattgataacgtcttggcaattgatgtgactaaatcgcggacttttttaccgccaacattttgtaacgtcaatggtaatgccatattttcataggccgttaagttttctaataagttgaagtcttggaacatgaacccaatttccttggcacgaaaatcagctaattcattccctttcaatccattaattgcttgcccattaatttcaacttggccagcagtcggtttgtcaagggttgataaaatgttcaataaggtggttttccctgaaccagaagctcccatgatcccgacaaattcgccctgtttcacatcaaaagtaacgccttttaaggctgtgtattgcttttcgtttggtttaccgtatgtttttttaacgtctttgacgctaacgactgttggtgtgtccattaataatacctccaaattttatgataattctaacttacaagatattaaaacggcatgcgcgctttttagatgacattttaacgggctaaaataacaattttgtaagattattcccccgttctttaaaaatcaatgtgaaacagtcaaaaaagttttgtcttccctttctgatttgactataataaaaacattgtgaattttcagaaaaggggtttctttacgatggatgaaatagaaccaaaaaagaaatatattacctggcaagtccttgctttaatggattttgtgaccgtcattggatttgacgatattatttataactttcaaaaccaagggatggcagttgtcttctcatggattgtcttactattcgcctatgtcctcccttatgaattaatggttggtcacttaggctctgctttcagtaaagacggtggcggtctttccagttggatgcgccatacaagcggtgatgtttggggttacttaaccgcttggtgttactgggtagcgagtttgccatacttggtcgatgttgctaattcaatggtcgtttccttcttttggattattactgggaacggaaatcttgaagacaagctctcacgggcttcctttgcgcttttaacagccgcaattaccatcctcttcatcttcttccaacacaagtttacatcgtctctacaggtactcagtatcgttggtgggggcgcgatgtttgtcatgaccatcctctttgtcctaatgacctttgttggtttattgaacggtggtcacattgccacccatccattaaacgcacacaccttcattccaaaatttgatttacattacttctcaaccatcggcctcttaattttcgccatgaacggtgccgaacttgttgcaccatacgttggccaaatgaaagatggtaaaaaagattttccaaaagccatgatggccctcgctctaatgaccgccttcctaaccatcttcggctcattagcaatcggcgtcttcttcgatgccaaccacttaccagctgacttgaagatgaacggttcatactacgccttcttagcccttgggcaacaattccacatgggtaaagtcttactctacatcttcgctgttacccaagcgatttacatgggcgctcaattagcgatgctactcgatggcggcacacggattttcttatccgacactgccaaacaattcttaccaaaagcactgactaagaccaataaacaaggccttccaatcaacggttactggttgaccactgggatttgtgcctttgttttagcatctagtgcctttctgcccgagattaacgacatcttcaattggttgttaaatattaacggtatcgtctcaccatttgtaacttgtttcatctttgtcgccttcttacgggtccgtttcaatagtgaaaaattcccatcagaatacacatacattaaaaacaaaccatgggccatcatcgttggcttctggtgtttagccattacagcattaggaacgatcttcagtatcttcccacaagatgccacacctggcacagccaaatatacacatgaactaatcttaaacatcgtcgtctcagtcgccttaatgggcctcggcgtgattttaccactggttgcaaaattccaaagaaaacgagcagcctaactaaaaaagattcgcccatatggggcgaatcttttttagttaggctgggaaatattattagattttaaattaatgaaaagcattcctaatatttgctagtgtcaaatcttgcgtttgttcaaaacagatttgggctttcgttaatactttttttgaaccaatcccaactgaaatagcgcctgcagcattgattgcttcaatgcctgattgtgcgtcttcaaccccaatacactctgttggttgtaatcctaataatgcagcacagcgttcaaatatttctggcgccggcttaccattctttaacgttgctgggtccactcgtgcttcaaaataatcactcaatcccaaacgttcgagaactattggcgcattcttagatgctgaagctagtccaatcgcataacccgcttgcttcaattcaactaaaaacgcttctatcccaggcgcgattgaatccggcgtcaattgttgcaataattttaaataattatcatttttagcagtcgccattgctactttatcggcttctgaataatctacatgcttaccagttgaatcaagaataactgctagtgacgcttcacggctaatgcctttaagttgttcagcaaaagcagcctgccacggaatgtttaattgatctgccagctgatgccaggccatttcatgatagattgacgtatctgtaatcacgccatctaagtcaaataaaaatccttttatcgattgaaatttttgcattcgtttttcctttaactacttattttctaacacttggcgttcaccattaaccataatgcttaaagggtcaccctcgattaattggacatgcgcaccacccaggtcaacagttatttcaataatacgatctctgaaaacttgtctgaaagaatagctttcccatttcttaggcaagaaaggtttataacttaattcacctgcatcactcacccgcatgcctgcaaacccatggacaattgctaaccagccacctgtcattgccgtaatatgcagaccatcgtcagtgtcattgttatagttatccaaatctaaccgagccgtccgttcataaagttcaacggctttgtcttcatagtgtaagtcggcagcaataattgaataaacggatggtgataagctcgattcgtgaacggttaacggttcataaaaatcaaagttgcgcttcttttcatcttctgaaaaatcatcgataaagttccataaaccttgaataacgtcaccttgtttgatgtaaggtgaccgtagaattctatcccacgaccaattctgattaattggtcgttgatccgctggaatctcgctcgttggtgccaatgctttatccaaaaagccatcatgttgttcgaagatcccgagttccgtgtcatatggtaagtacatcttgtcaacaattgattgccagtgttgccgttcttgagctgtaactgctaatttgtttgcttgttccggcgctacttgatcgataatctttaatgtgtattctaaagtccatcgcgctaagtaatttgtgtaccaattgttatcaacattattttcgtattcgtcaggccctgtaacgccgtgaatcatatattgccctttacgttgactatagtgcacccgatcagcccagaaacgtgaaatttctgttaaaacctcactaccttcatttaatacgtaagattgatcaccggtatattttgtgtagttataaatagcaaacgcaacatcactattacggtgaatttcttcaaacgtaatttcccattcattatgacattcaatgccgttgaaggtcaccatcggatataacgcaccttttagcccttgttcttgagcgttaataaacgccccatctaattgatcgtaccgataacgaagtaagttcttagtaatcgccggtttagtaatccccagataaactggaatacaaaaagcttcagtatcccaataagtcgccccaccatatttctcaccagtaaatcctttgggaccaaaattcaaccgagcatcatctccatagtatgttgtgaaaagtccaaataggttaaaacgcatcccttgttgagcagcaacatcaccttgaatcttaacatctgactgtgcccagcgttctgcccatattgcttgatggtcatctaacagttgggcataactagaattagaaatcgcttccattaattgtcccatagcagttatcaatgcttctcgcgtctcataatcacgagaagtcacaacaatcacacgcttttcgatagttcctacttgtctcggttctaactgcgtttcaaatgtatgttgaacttctgtatccgtcacagactgggcaacttcagttaaagttgtctgatggctaacttgtatcccagttgtgaattgcggtgtcccaaattgattgggtttggtttgcgcaattaaatactggggattaatttctagcacttgccaaaaatgttcatcgtaattggcatcttcattttgaacattactatcaatagcggaaataacccttacttcaacagcttggtctccgaggttttcaaaactaacccgttgcaccgataattctttttgcgctacgctgagaaagcgttcaaacttaaatttaatttgtgtttggcccttcttaacgacaaaggatcgggttaaaacagcactttttagattaagatcaagctcgaactgatcaaaatcatcttgcgctaagtctaacttttcaccgttaatcaagaagttcattctaataaaattgatagcgttgataaccttcccaaaatatttcggatacccattcttccaccaaccaactcgggttttatcagggtaccagacgccacctaagtaggtacctaataagctatcacctgaatagtcttcttcgaaaaagccacgcatccccatatagccattgcccaagctagtcattgactcctgcagtcgtttatcggcaggttcaaaagtgtgtgtaataacgtgccatggttgaacgtcaaatattctcttcatctaaattacatcccatctgtaaaatttactaaataatggttacgccagtttcaaaatcaaagtaatgtgccttcgacacttcaagcgcaaattcaatttggctacccggttcgtgatgatctctagcatttaccttcgccacaaactccgtctcactaaccgtcgaatacaacatcgattcagcgcctaacagttcggcaaccttcacatccgcggtaatttttgcatcatcaaaagtttgtagggcaatttcttcagcatgaatgtcttctggtcgaatcccaaaagtgactttcttaccaacgtaccctttttcttttagtagttggtattgcccgtctggaatggttactcgcatttgtgtgccgctcacaacttgattaccttcaatcttagcttcaaagaagttcattgctggtgaaccaatgaaaccggccacgaatttattcgctggttgattatacaattcgataggtgagccaatctgttgaatcataccgtcattcataataacgattcggtccgccatggtcattgcttcaatttgatcatgcgtgacatagataaaattacgacctagcttttgatgtagctgtgcaatttcggcccgcatttgaacccgtaacttcgcatccaagttcgataatggttcatctagtaaaaagagcttcgcatcccgtacaattgcgcgacctagggcaacccgttgccgttgtcctccagacaacgcactcggtttacgactcaagtaatcacttaagcctagaattttagcagcatcaaccactcgctttttagtatcctctttatcgttcttacgaatattcaagccaaaagccatgttatcgaaaactgtcatatgtggatataacgcataattttgaaaaaccatcgcaatattccgatcacgtggcgctgcatcgttcatcactttaccatcaatttcaaaagtcccgctggtaatatcttccaatcccgcaatcattcttaaagttgttgacttcccacaaccggaggggccaacaaaggcgataaattcaccatctctaatcgctaaattaaagtcggttaccgaatttgtttcattacccggataacgtttattgatgtgttctaattttatttcaaccatatttgctgactcccttatttagataattcattcttaaggcactcatccaatgtgagcactacatgaataccgattgtaacggcattcaattctcttaacactttttattattcgctaaataagttattttagcaatcgctttcaccatgttaccgataacagaatcacttcactaaaaaaccagtctgctccctgtaagcagtgcgataatccctttatggttgtcagatgaaatacaataattcatctgacgactatggagggatttttgtatgcccagatctaaacatacggtactcgagaaattaacaatcttagatgaactgacccaatcaaaaattggactgggtccggtggccaatcgccatggcattaatcataagacgctagagcgttggcgagatcgatactcccgtgatggaattaatggtctaaaggaggctaagaaaaacaaacactattcgaagaaactcaagctcaaagtagtccacgcatatcttataggcgaaggcacctttgatgaacttgcaaataagtttggacttcgtggatcgcagcaagtcgtagactgggtaaacaagtataatgggaataaacctttgacggcgtcgccgtccagaaagcaggttcccactatgagccgtaaaacaaccttggaagaacgcattgaaattgtcgagtatgtcaccaagctgaatcattcatacacagaggccgctgaacgcttccaagtctcttatcaacaagcacgttcatgggtgatcaaggccaatcacggcggctatgaggcgctcgtggacaaccgtggccatcacaaagaacaagctgagctgactgaactcgataaagccaatcttgaaatcaggcagctcaaagcacagctcgcagacaaagagcttgtggaggcattcgcaaaaaaattgctggaaatccagcgcagggggtgagtaaacaacatcgactgtcttacttcgcaattaatgaggtcagtcaaggcaagcgtggtgcaatatctacgctgttggccgttgtcggtgtaagccggcaggcttactacaaagggttaaatcgagaagaaacagcttgggaagcccgtaatcgtcagctcaaggaacggacacaatactggtttgattttcatcatcaaggtatcggtgctgggaaccttttattgaatcttcaacatgatgacctaattgacttccccgttactttcaggatggtacgtcgtgtgatgcgggagctcagcttgacatgtcaaattcgggtcaagaagcacagtcgacataaggagaacgaacagcacattcaagacaatgtgctcaatcagaacttcgacgtcgacagtcctaatcaggtctggttgtccgattcaacggaactgacttacggcgtaaataataagtataaggtgcgcttgagtggcgtccttgatctctacggccgacgtttattgtcctacaatttgagcactactgaaacgtcagcagcagaaatcgaggttttccaacgagcctttgaggcttctggcgacgtccacccattggttcacactgatcgaggatcagcctacacctctggtgccttcaacaactttcttggtcgttacaacgtcacacgtagtatgtctcgaccaggaacaccatacgacaacgcaccgatggagcgctggtggaacgaattcaagttacggtggatggctcgccatccactagcaaagacttgcgggtctaaactttctggtgttggtagaagaaattctactgacaccttttttaatttatgacaaaaaaatagaacatctcaacgatattctgcgttacgcttttaagtgactaaaccaaaaatgaaagcaggcgttaagatgtccaacactgattatatactaaatttacttgatattacagacgagaatattaaaccttacgaggtttataatacattcatcaaaaatattagaaccaaaataatcaaagccaaattaagctataaaccaggacgttgtcctgactgtgggctttgtgcacagattaagaacggcttcaaagaagttacctacgatattaatagtctgaatgggatcccttatcggttacggttatttaaacaacgtttctactgtaaaaattgccactctagccattttgcacgtagtccgtttttaaatttcaatagtattttcacacaagatattattgagcgaatcatccaattagcccaagatagtttaacactcaaagagattgcgaaactcgttggtgcttcgcctagctcagttaatcggattttatacaaaaatagccactatcactggcatcacaagccactgccacacaatctcagttttgatgaatttagtatcaagaaaaacgagtacgcttttattggcattgatgcagatacacataagcagctcgtcttattaccagaccgaaagaagaaaacaattattgagttctttcttaatcaatattcgctctacgagcgacaacaagttgaaaccgtcacagtcgatatgaacgccgattatgcaacgtatgcacatcaattatttccaaatgctgaaattatcattgatcgatttcatattatccaactaattcagcgaacactaactgatgcccgtgtattaaccgttaaacaaaccgaggaccatcacaaccgaacgtacaaagcacttaaaacgcattggcgactatttaataagagtgaaacacttttagatgcccagcatattaaatattatcgcggtttaaatgaatacacgacacaacaaaatattgttgatctaggattacaatataatcccgagttttcgcgtgtctatcaagcttaccaaaccattttgaacgcagttcaaactaagaactttcaagcaatagaacacctgctagatacatatacaccatctaacagccccctagatgtgacgatccgaacactaaagcgaaatcgccattatattaaaaacgctctcgaatatcctttctcaaacgggcctatagaaggtttaaaccgaaaaataaaaacacttaaacgtaattgttatggttttaagaacgttcagcatttctttacccgaatccaattaattttgggataagaaaagaggcatctgcctttcgacaaatacctctaatatttcgccaccaacaccagttgacaaagacccagacttgcgaagagcttgtaagactggttgaggaaggaatcgaatatttcaatcaccacaaccgctcagcacaaagaaacggcctcaccccagatgaatactggagtgaagccgcatagagacagattcaactttatattatttcatttgtcaacttgacagggcctagtgcacagactggtttttaatcattcttttatttcaaacaagtaagcatcataagccgctaaccgaaagtgttgcttcaccggttgcacctgtccattagttagacagcattgccaattttgtttgcagatacgttgtggcaacgtcactgtcttatcctggtcgctgagattaacaatgatcagcaccgttttttgcacaccttttctgagataagcaaacacagttggatcattctttaatagtaattcgaactcgccagaaatgaacacactggattgctgtctgatccgaatcagtcgctgatagaaacaccaactagaatctggggcttgcatttcatcttcagcattgattgtttcagcattccgattaattgctaaccatggctggccggtcgtaaagcctgcatgatctccagcagtccactgcattggcgttctagagtgatcacgactccacaacgtgaccgtcttgagtgcttgttttggcgctatttgttgtgccaataatagctcgtattgtcgatgcaattctttagcatcaacctgattaatcgcggtaaagttgaagttcgtcattccaagttcctgtccttgataaataaacggtgtcccttttaaccccatatacatcagcgcaatcgctttagctgacttggtcgtctcatttcctaacgtactattaatccgtgggttatcgtgattctcaacgtataacgcattccaaccttcatgcttcaaatctgtctgccatcgtgccaataccttcttcaaccctaacggatcaatacgcggtcgtaactgattatcttgacgaacattatgctctaactcaaaaatcatattgatatagccggcttgttttggttcagtccaactaatggcttttttacttgtcacaccactagcttctcccaccgacataatttggtattcattaaataaatcacgcagttcagccatatagtgctcaatgccctccacattcataaaaggcgcccatggattatcacgaattttaaaatcccacggctctttttgaatatgactaatagcgtctaagcgaaaaccatcgatgcctaagtctaaccaccaacgaatcatcgtgtagatggcttgtcttaactgaggattacgccaattcaaatcaggttgttcctttgcaaacacatgaaaataagcctgtttcgttcgttgatcatatgtccaagttgagcccccaaaaaaactttgccaatcattgggcaacttatctggggttgcatccgcccacagatagaagtcacgatacgggttattcttcgatttttggctttcgataaaccacggatgttgattgctcgtgtgattaacaactaaatccagaatcactttaatcccaatagcatgcgctttttccaataattgtttgaaatcagccattgtgccatattccggttgaatcttctgataatcagaaatatcatagccattatcaacgttgggagattgataaatcggatttatccaaataaaattaatccctaatgatttaagatacggtaacttagcaataattccttgaatatcaccaattccatccccatttgaatcattaaaactccttggataaatctgatagccaactgctgactgccaccacttatctgtcattctagttcgccaccttcaccgcaaatgattgccagggacttaaatgataattggctaacgaagtaattgactcgtggccattttggataagcacttgttcaattttaacgtccggtaaatcaattatttgtgcttgattcgaaaaattattgacaactaaccacgtttcaccttgataacaccgtttgtaagcaaaaatcatttcggccgtcgttaagagttcaaaactcccccaaatcacaattggattatttttccgtaactcaatcagcttttggtacgtataaaaaagtgagtctggatcagccaatgcggcctcgacattgattgtttcatagttaggattaaccgctaaccatggcttaccagttgtaaaacctgcattagtcgtctggttccattgcatcggtgtccgtgcgttatcgcgccccttaacattaattgattcaataatagttgccttaggatagcccgctttaattcgttcatcatacatccgcagactttcaatatctgtcacttcactaatatcatggacaatccgattcgtcatcccaatttcttcaccttgataaatgtacggtgtccctttcaataaatgtaataaaatagctaacattttaccgctggcaacccgatattgaccatcatctccccaacgcgaaataattcgtggtaaatcatgattattccaaaataacgagttccatccttgatcatctaattcggtttgccatttagcaaaaacgcgcttcaatgcaccaatctttaagggttgtaaatcccatttagccttaccaggttgttcatctagtccaacgtgttcaaattggaacaccattgataattcatggctctcgggattcgaatataatttggcaatttcaggcgttgcgccccatgtttcgccaacagttattaagtcatgatgaccgaaagtttgttgattcatttcttgtaggtattggtgcaatttcggcccattacctgtaatctcttgttctggctgtttaccaattaagtcgatgacatctagtcggaatccaccaatccccttatcaatccagaaattcatcatgttatagacagcttgccgcatttctttattttgccaatttaaatcaggttgtttttgactaaatagatgtaagtaatattgctgactcgtttggtcatactgccacgctgaaccggaaaaagttgactgtagcccatttggtacgccaccatctttagcaggatctgcccaaacataatagtcgcgatacggattattctttgaccggcgcgcttcaacaaaccacgcatgttcatcagatgtatggttaaccactaaatccataataatccgaattcctcgttgcttagcctctgcgattaattgatctaagtcagccatcgtcccaaattcagccatcacagcctgataatcagaaatatcataaccgttatcttcattgggtgattggtaaactggtgataaccagattgcaccaatccctagtttttgtaaataatctagttttccaataatcccttggatatcaccaatcccatccccatttgaatctttaaaactacgtggatagacttgatagacgaccactgattgccaccaatattgcttcatcttaattctcctctttaatataaaataaatcctttaggggcgatttgactcatcccagcatcgtttgtcaccaattgactgaactttggttgttcaatttgcataatttcaactactgtcgttgccaagttaaagataccggtaatttggtggtctttaaattggcgcgtaatcttcaggatatcaggtgtttgcggatcaagtgaccacgtcattgtcccttctgataagacctcctgttgtgctttacgcaatgcaattaatgacttaacaaattgatacatctctaggtcttggtcagccgtatcccaaaccatacatttccgacaacctggatcatcagtccctgtcatgccatattcatcaccataatataaacacggtacaccaggttggatatacgtgaaggccattacctgacgcattaaatcacgatctcccctggctgccgttaataatcgggctgtatcatgtgaatcgagaacattaaattgaacttggttcgtttgatctcggtacaacattaactggttatttaattccgaaatcatcttatcagcagaaatttctttttttacaaagtagtccaaaatcgcatctgtatacgcataattcataaccgcactaaattcgtccccattaagccaactttgcgaagagtgccaaatttcacccagaatatagaagtctggtttagctgcatcgcagacttgtcggaattttttccagaaatgatgatcaacttcattcgcaacatccaaacgccatgcatcaatatcaaattcttcaatccagtagcgcgctactttcaataaatagtcttgtacttctggatttgccgtatttaacttcggcatatgcggcgttgtggcaaacacctcgtacgtaatatccgtcgcatcttcaaaattcttgccttcttggtaactaacgggaaattcatgaatgtggaaccaatcagcatattgcgaatccgcacctttttgaagaacgtcttgccattgtggtgactgatcacccatgtgattaaagacagcatctaacataatcttaatcccacgacggtgacattcatcgacgagtttccgaaataaagctttatccccaaaatgtggatcaatctctaaataatcaattgtgtcgtatttatgatttgaatgagccgcaaagatcgggcagaaatataagccattaatgccgagatcaactaaatgatctaaatggtcaatgaccccttgaagatccccaccataaaagtcctgcgcttgcggtgattgtgtcgaccaagataatgtgccttctggatcgttcgtaacgtcaccattcccaaatctctctggaaaaatctgataccaaaccgtttttttgacccattcaggtgctttaaatcggtcgatttcgtgaaagtacggcattttaaaataactttgattcgttcgttctagtggcgaaagcccctgatcaccataaaaaatgctggtgccatcttgaccaattatttgaaacccataagctaagcgattgtggatcgccgttacttccgccgtccaaaaatcatataaatccgttgataaagtccgcgccatcatgatcggcttttgatcccatttttcagtcgccattaagtacggatcgccacaaaccagtttgacttgctgcacatctgctcgcgctgttcttaaacgaaggcgcatggtatttggctgatataaaaaagcaaattcgctatctgggcggtgataaattgctgctgtattcattttaactaaccatccttactatatttttttcatgaaaaaagccgtacagcaaaccaattcaagttataccgagttgattgtttgtacagctttttatttagaaactgttctgagttacttaacagaacctgatgtaatcccttcgacatagtacttttgcatatagatgaataataaggtaatcggaatcgcgattaaaacacacccggctgtaaatgacataaacaacgagttggcagttgttttattcatcattgagtacaaaccaatcgcgactgtatagtgtttaacatcgtcacccatgataaccttggcaaaaataaagtccatccaaggacccatgaaggccattaaagcagtgtaaacaatgattggcttagaaagcggaattgtaatttttgtgaaaatctgccacttattcgcgccatcgatcattgccgattcatcaagtgccattggaatagtatcgaagaaacctttggcaacatagaatcccaaagctgctcctgctgagtagattagaattaaagcaaataaactttgcgttaaatcaagcgcctttaaaatgtaataaacagcaatcatactcataaaaccagggaacatatttaacaccaacgccacttttagaaatggtcttcttagtttgaagcgtagtcttgataatgaatacgccattgcgatcgtgataaaagttgacagaatacagctaaaaattgcgacaaatagcgtatttaagaaccaacgaacaaacggatagctccccgaaacatcagcaatcaactttgtataattggacaatgtaaaacttttaggaatgatatatggaacgaaggcgcccccttcttgtctaaaactcgtcaaaacaatccagacaattgggaataaccagataacagccataatcacaagaacggcatagatcaggtagcgcgtatttctctgttctgaacggtaatttttacttttcatacgacctgccattttctacgcctccttgtaagaattagttcgggtataagcccataaactaaagactgctgacaagataaagattaagatcccgataacggatgctaaattataatccattgtattgaccgttaagttatacaaccaagttaccagtaagtcggtcgacccagcaccgtaatagttggagtttgaaggtccaccaccagttaataggtagatgacgttgaagttattgatatttccaataaattgttgaatcaacgacggcatcatcacaaataaaatttgtgggaaagtaattgatttgaatatttgtagtttattcgccccatcaatttgcgccgcttcaatttgttcttgatctagattctgaataatcccagttgaaattaacattgtggttggaatcccaatccacatattaaccataataatggaaatcttagctaaggttggatcagtcaagaacggaattgactgcgtaatcaaccccatatttttcaaaattgcattaattggaccagcatcgtttaacaaattatgcatcgtcaataatgaaacgaattgaggaacggcgattgtcacaacaaaaatcgttcgccacattttcttaaaccgaatgcctttagcattaatcaatagcgccaagataatcccaaagaagaaacaagtagcggttgcaaaaatggcccagattaacgtccaacttaatacaggaaagaatgtagacgccatatcaccggtaatcacattggagaaattcttcaaaccgacccatgtgaataaattcttgggtggcaagtgcgtatgatcatagtttgtaaaagcaatcgaaaccatatataacaacggtaagacggtaaagaacaaaacaccaagtagcggaatcgtcattaacgtcatatggaatcgttcattgaccaaactatttaaatcgtttttcaacgtcggaattggatccccagctgctttgagttcataaagatgccgcgcactctttagattaatcacatataaaatgatcatgacgatacagacaaggatggcagaaattccaaacaataacagcaacattgaattatcgcccttttgtaaaacttcaatccctagattattatcgtaggctaatccttgttttttagtccctaacgtctgcagcatcgctaatgcatgaatcccatttttaatgaaccaagcgaaaaacccaacttcagccattaaaaaaattaagcccttagtaatctgccgattagctaagttagcagcgcccataacaataaacgacaattttgtagcgatatcgccctttttaaataatgttctgaatgttatatgttgttccttgtatgcctttttaaacatataatcgcaccttttctttcatttcaacccaaaatcagtaaaatttacttcgttttcttagcgttatccgaaacgaatttatctaattttgcttgatattgtgttgcattgatcttgcccttataaacatcattgattaatgaatccattggtggccagaatgttgtcatttcaggtaacttaggcataacaactgagtgatcattatctgacatcgccattacggatttagcaactgcatccgttttaacgtttgttgcttcttgtgcacgtttattcgatggcacaacaccattctttttaaattcaatctcttgtgttttttcgttactcaaataatttgctaacgccattgaagcgagtggtgatttggtttgttggttaacaccgtagaccttaacgcctaagaaagccttcatttgtttttcgccactaccaaagttaactgttggataagccgcaactgccattttgtcccctaaagcctttttaacatcatttttagaccaaggacctgataagaaagcatcgattttgcctgattggaggtttgctaaagccgctgcattggtttggacaactcctggatttgatttttgtttagcaatccatgaaagcacctcaaccccattttgattattgaagttagtgccctttaaatcttcgccattttcaccatacaagacgtcgccgttactcataaagagcggtgcgaaagtataatttgcaccattttcagcaaagtttgcgcctaatttacctttttgagttaagctatcccatgatttaacatcattttctgataacttgctcttattgtaataaagcacttgtgattcaattccatatggatagccataaactttatttttccaagttaccccttgaattgctgaatcaacgttattctttttaattgttgcaacttgtttcttaccaatgggatataaaagccccgcttctgccatttggccaatttgatcgtgtggcatcatgaaaacatcggctgccttttcaggatctttagaaacatcttttaaagtgtccgcagaagagcctgtcttaattttgactttaacatctggattagctttttcgaattttgaaacttgtcctttaatggctgcagtatgttctgtatccacccataatttaatatcaccttttacttgtgaactatttgtatctgagctggctgattgatcatcactcttatttccacaacctgctaatgcgattgctgacacacccaagactagaccacctagccaaaatcgtttccaactatttttcatcatgtactcctcctagaattttaatcgtttaatttctagcacaactttaatattacccatttatcaggtggttgcaatcgttttcaatttgttaccgataacagctttttcagttagaccaaaattgctgtttcaccctataatcggtttttataagcgtaatgtgccacccatttcgattttaggttcaaaaattaatgaacttgtattaccccgattggcaatcttatccaacacagattccccacaagcgttacccatttcaataattgattgtttaaccgttgtgattttaggagatgccacttgattcaagaaaaccccgtcaaacccagttactccataatcatgcggaatgttcccgccacatttagcaatcccccgttcaaccccaattgctaagcgatctgtggagcaaataaaaaccgaattccgctcaaattcggtccagtgtgcttcaataaactcttccgtcaaatggctatgattcttaaaccgatacattttaggaatcagtttactttcttgaatttgttttaaataacctgcttcacgtgattgttcgaaagattcagtgctatccattccaaaatagattaaatgttcataacccttttcaagcgccaaattagcaatttgataagtccccaatttattattagtgtctacataatcaaatccatagcgattctcaccaaagacaacaaccggtttttttaacgcctgaatccattcgacgtctttttcacgtaatcccgtaataatgtagccatcacaattcccgatatcaaagttacaccgagttactaactgcagcgaatactgatgtaggtcaagtgccttagcaattccgaccattagattcatgtaatatggttcggtaacgtcgatgtcttccaagatacacaacttgatgattcgggtactgttgctgactagggctttggcaattaaattgggatggtaatccaattccttcattgcagcatacaccaattccttcaattcatctgttacttgttccggatgattaatcacccgcgaaactgtcatcttagaaacgtttgcccgcttagcgacgtccattaatgttgccatctctccaccccttaagttcaactttttacattctttcacaattataccatttatgcataaaatgattacgatttaccttattggtattaaaaaaagcccattatgaagtgaaccccaaatattggacgaaactttaagcagctttctgggttgtaaaaattcgatattcaatcggacttttacaacccagttttgttttaattcttgaaaaattataatcatcaatccaaaccgatatttgtgaaactagcgtttcataagtatcggtttctttttggtagaaagcttcggctttcataatatggaaaaagctctccattgctgcattatctaaacatgttgctttgcgagacatactttgaaaaatgcgatgttctttcaagatatgagtccaatcttgatgctggtattgaaatccttgatctgagtggactgttgtccggtattttaaattcttagagattttcttaactgctcgattcaaaacagttgtagtaaattcaacagtagggtgtttactaacttgatggctgagaatttcacctgagaataaatcataaatacatgtgaaataggcgcgttcatcaattgtcttggttccccagcgaacttcagtaacgtctgttactagttcttgataaggacgatcggtgaagaaacgacggttgattaagttcttagcaacggtgccaacattgcctctatatgaattatatttacgagtacgtttgttaaatgcagttgatagtaattgcagttctcgcattaagacaagtacttttttatgatttactaagatattcatacgatgtaattcaccagttacacgacgataaccgtacgctggatgattcttcttgattatttggatggtttgtttaacagattggtcagatgaaccgttcggttcatgactaataatgtattcatacgtacttttggccataccaactatttttagaatttttactagtttgtgtttaagccttagctcttggatgacttgcgcttgttgttttcttcttcctggactaaggctcttaatttttttaggtattcattctcgatttgtagtaattcattttcttctctaagacgttctaactctgtttgttgccgtttttttgattgtttatcagctgacataattgtttgccgtcctttggaacgatataaggcatcagcaccctcagtctcccaaatatgttgccattgccagatggtcccgacgtttgagatattaaaatgaagtgcggttttcggataagaagccttattcgttttcatccattttaaaacattcatcttaaatgagccaccaaatatttttttgggtgataggacatccagtccttttgggccaaaggccttataacgttgaacccacgagacaactagtgagttactcttaataccatattttctcgctattaatttataacctaagggtgacgttagataatcctgaacaacttttatttttgatgttttagaatatttggtcaatataaaaacccccgatattggattttggtccaatatcgggggttcacttcattcggggctttttaatttttattccgttggatatttattgtttaaataatagtagacaggtagtcctaataaagtaattcctatcccaatgagtgtcagcatcgtctgggtgaataacgtattcaccacgatgaaaatcccaccaagaatggcgatgactggaatcactggataaccaagggtgcgatacggacggtttaattctggttcgcgtttgcgcagaatgaacacagcgataaacgttagaatatagaaaatccagatgacaacgaccaacatatcagtcaatgtattgaagccacccatgaacatcataacgatggcgatactaatttgaactaaaccactgacaaccggcgcgcctgttttagaaagggagcgcagttgtcgactgaatggtaaccgattctcgagcgccatcgcataaggaatccgcatcccagtcatcgtgtagccgttaatcccgccatagacggaaattaaaatcccaatagtgatgattttaccacccacaccaccaaatagcactcgagccacttctgaagccgcattcggattgccggcaatctgattgattggcaacacaagaacgaagacggcgctcactaagaggtagacaaccatggttcctgttaaaccaattaaaattgaccgcggcaaatcgcgttctggatgcttcaattcacccgcaatattcccaacgtgaatccagccatcatacgcaaagagggttgctaaaacaccactccccagcgctgacaggaaactccccgatccatttgaccgggtcacgtcaaataatgacacatgaacggcgttgctgcctggatgaattaacccgaatacaataataatcgcaagcgggattaatttaaagacggttgtgaaggattggaatagtcccccaacccgggaaccaaagaaattcaagattgttaagctgagtccgacgatgattgcaattggaatctgccagtgagctgaccaactgaataagttaatgcattgcgttgcaaaaacaatcgacaacgccgcaatgttcgctggaaagtagactgttgtttcggcccaacctaataaaaatgccgctaaactaccataagtatggtcgatgtaccgcatcatcccgccagtttctggaatcgcagctgctaattcagcagctgtcaatccagcacaaattgtgattaagccgccgacaagccatgcaagcattgtcagcccggtggagccggtcgcatgcgtcacaggatccgctttaaagaacacaccagcaccgatgaccgttcccatcacagtggctaatgccgcggtaaatccaatcgtttgatttaatgcttgtttttccgtgggcatcttaaccgcctcctaatatcatttataatatttattatgacatgttgaaagcggtctttactagtctaatttgcaactaaattcggatatgtgcggcggaaatcttccattgcaccaatcaagttcgcatcattatgatactgacacgtccgaatggttggcatgaaaggcgcaatatcgacttgcttgagtatttcctgtaaagctttttcaatatttggcaccaagaaatcggcctgcgacaccccaccacctaaaataaccgcttctgaatcaaaactatattgtaaattatagatggcttgtgcgagattatcatagagcacctgtgcctccttttgcgcgagtaaatcgccttgatcagccaattcaaaaacttcacgccctgagtagttagtatgtgcctcttgattataacggtcagccatgtgaacggcggtcccgacttcacttaaaatccgaccatcattcatcatcatgtagccaaactcaccaccgaataaatggcgaccatgttggacttgtccgttgacaatcactgaaccaccaacgccagtgccaattaccatgaacaacacattttttagccctttagcagccccactaccgacttcggctaaagccgcgcaattcgcatcattttccattacgactggtaagtcaaagcgcgtttcaagttcatcttgaatttcaaaatgatgaatataagggagcgcactggccccttcaataatacccgtcgccttgttcactgcacccggcgtactcattgcgaccccaacaacttggtcactagccttaaactccgccacaatctgcgtcagcacatcataatacgcattcaacgactttggtgtggcaacagccccttgtttggtcaattgttgcgccgcaccatcccataaaccatatttaatcgtagtgccaccaacatcaagtaatgctaaatttttcattcgtcaatcccccaatcgattctcttatgtattttgataaccgcttacattctaccataaaattacgctgggcacccacaacagtgttaattattggcgtacacgctaaaggcgaactttggtttttaatggctttcatggtacacttaacggataaggtgggtaaccacccatttcacatcaaaggagcgtcaacaacatgtcaactaacgtttgtttaatcgcaatcacaattgaataagcatgtggccattttgcggctatttctgttggcattcgctttttaaatttaattaactgagggctgtgacaaaagaatatttttgccatggccctttttttcaattgaaacgtgctccaccaggcatctgctctcggttagctacgtcagccaaataaccaacaaatcggtttttcgtctgcctatgctaatcctcagcagataaccgccggtgccgcactcttatcttaaacgtgctttcttcaaatagtcgtctgcgtttagcgccatctcgtaaacaatcggcgttgccgctcatttacgagatattgctaatcctcaacggctgaccatttgaagacgcactctcacaaaaaggagatctcatggaagaaacttatatgcaacctaaaaaggttttaatcactggtgttagtcaacgccaagttaattttgactatacaatgcgcgaactgggtgaactagcccgtgccgataacttagaagtcgttggtgacgttcgccaaaatatcgaccaagctaatcacgccacttattttggtaaagggaaggttcaagaaattaaagaacgcgccgtcgctgaagatgcggacattatcttgattaacgatgaactttcaccttcacagattcggaatttagaaaaagaactcggaataagcattcttgatcggacgcaattaattcttgaaatctttgctagccgtgccaaaacaaaagaagcgcaactccaagtggccatcgccgaagcgaaataccaattaccacgcctccatccttctgaaaacaagttggatcaacaaggtggcgggggtactgcgaaccgtggggcgggtgaaacccaacttgaattggatcgccgactcatcgaaaaacggattacgaagctcaaagccgaacttgctaaaatcgatcaacaacaactcgtacaacgccgtcaacggacgaaaaatgcgattccagttgtcgcactcgtcgggtacaccaatgcaggtaaatcaacgactatgaatcgaattttacaacggttgaaccccgatacacctgaaaaacaagtttttgaaaaggatatgctctttgccaccttagacacgagtgtccgcgaaatcgtcctccccaaccaacagaaattcctgttgagtgatacggttggtttcgtcacaaaacttcctcatcacttaattcaagcctttaaatcaaccttagctgaagcagcgagtgctgatcttttaatccacgtggttgattactcagatccaaactacttggacatgatggaaacgacacaagaaacccttgaatcactcaacattaaagatatcccagtcatcgaggcttacaataaagctgatttgaagccagatacgcgctatcctgaagtagacggaaaccaaattgtttattcagctcgcgatgaagtagcaatcgatgcattgattgccttaattaacaaacaactctttgaacaatacccaacgctcgacttcttagtcccatacacagaagggcaagctgtttcgtacctcagtgatcgtgccaatatcactaaacaaagctatgaagaagatggcacgttgattcgtgcacaaatcaacccagacctattaggacccgttaaaaagttcgttcaagcatagccaagcgctactttgcggcaaacaaaaaagcccatcgacataaatgtcgatgggcttttttcaatttcttattgatactttctgaaaaccatatctgcagctgcttttaagctttgaatttcttttgaatcaatattcattgttagttgtgtagactcttgagcataagccgctgcaatctcttgcaaaccaactaatgctttccgactgagcgtcacatagctttgtggaatctcattatcctgaacgaataataataaacctgcagcttttaaacgggcgatgtcattttctgaaaccccgattgaatgaagggtttccaaatctgcgcgttaatcatcggctagttgcttaattcgttgtaatagcgcggcttcatcaagattaaactcaactttttcgcaaatcatatctagcgtttcaaaatattgcatgctagcaacactagcgtgcaatgtattgataatttcatcgactgttttttctggttttaaataataaatcgtcattttattgtacccactatttttattaggattaaaacacttacttgattgccttaattctataacatttgtggatgaataaaatgcgtatattttaaatagtttaaaaatccggcgaaagataaattaaaaattttacaatctaccctgttaagtaataattgccgttatccgctaattctagtaggtagtattggtaacaataattgacatctaagaattcgttatgaatctccacctattttcctccactgactactttgttcgttcttggtacgcaatctgaaccactaattgatagggatcattgccttcaaccacgccactacgcccggccatcttgttcgggccacccgtaatccaagtatgggcgactgcaagttgataatcttgggctaggtcttggattggggttaagccaaccgtcgtaatctgcgctaacggttgtttggcaatggcgttaatccccccatagagcacccaacgatctgcttcttgtttcatttcataaaacggtaaagcaacttgattcccaatcgcataaattggtcgctgcaattgttgcgcttgttcatatatatcattatcacttaagcctgcgtaattcaagctaagatagccagattcaatcagttcgttaatcaaggatcctaaacgttgggtttgttccgcgtccattgtcagttgcgcgggcaagagattttgttcttcaaataagccagtggccggttgaatttgtgagatcacttgcgttttggcggttaccccatttagtggatgtggcgcgtttggatcaccacccagcgctttttcaacatacggtgaaatatcgatgaccgcatttttgccccgataatagaaatacaggttcatcactgcaaaatagaataacaccaaaaagacgaggaggttaatcacacctcgtccaaccgcttgagctttaaagtaggtcacactcttatatagaagataaaaatcaccaattaaacaaataactgaaaaaaggcgatttttaacgcgaccattaatatttaagtaaccgaaataatggttaataatgtctaaaaaagttaacacgataaatgtcccccttattgcgcgtaaaacaaattattactgcgtagcagtggcactgctactacttgaaaccactttagcgctactacttgtgttagcagagctactgcttgccgtggtcgtgttagctgactcatcattttgtggtgttgttgtctgctcatcatcagatgattgtgagttggcatccgtatccgtccgatcctgacttgaaacagccttagaagaggaattaacggttgattcagaggtcgatgaggattccgattcagactcagattctggttctgatgtattcatgctgctggttgaacctgtggttgcactactacttgaaacaaatgacgactgctctgtcttggtgttttcaacaggtttaaccgtatttgccacaatgttggtcgcactcattgcgataattaacgaaataatggcggctggtggaataatgggtggtgtgtgatatgccattttaacgctccctttctattatgcttggcagtcttcacagaggccatagagttcgaactgatgaccttcaatttgacaatttggaatttgctgactaaaaaaatctaacggacacattttcaattcaatcactttgccacactggcggcaaataaagtgatgatggtggcgatgttcaaaatcgcattgatatttaacgtgggcctgttcaccctctgtttgttgttctactaagccaagttgttcaaaatctttaatgttgcgataaatcgtattgtgactcattcccggaaaaatggcgcgcatatgctcgtcgatttgagtcacgggaatgtagcgattttcatatcccgataaatactgtagcatctctcggcgttgcttggtaattttgtacccatttgcgcgtaatacggcaatggcagtggttatttcgctcatttaatacatccgctcctctcgattaatcaatatgccattctagcacatgctttctaggttgtcaggcgctggcgcttgttactaccaacttcaatttagttgttaccccacactatttaccattatacccttaatcccataaccgttagctaagcacaactaaatttcaccaaattttaatgaatccgaatacaaaatagttgcattatctcaggccgcgcgttatgatgtaattcagatgatttttaagaaatcgtcttcattagccttctatcagtatttatagtcatttgaagggagattttacgatggaatttactaatcaaactaataattggtatcatgtttcacttgatacgcaaaatcaaaaatttatcgcaactgcaacgaacaatgaaaaaatcagcgcaagtggtattacaattgaacaagccgtacaaaaactcagttataaagtgaaacaaaccaattcggttaaccaacacttatttgcataagggttaaccatacgttaaaaggaagcctgtcgaacgcgttcgacaggcttcctttttattttcaatgatcaattttttagggttgcgattaatgttgctaaggcttgcttagttgtttcccagtcatcgttaaccaacacagttgcccgttgatttaaatggctcggtaacatcagatcccgcttaaattcagcactttgaatccgtttttgaattgcttcaggactatccttccgtttttcaaggcgcgtaatcaacgcatctgtttcagaaaccgttaagaacaagaccgatgcttcttcggggaacgtctctaaataagtctgtgcccctttggtatcaacaactaggctaatcagcggtgctttttgccacgccaaatctaacgcttcatgtgaagagccatattgatagccagaatagttcaccgattcaacgaggtgcttttgtgccaaggtgtctggtgtttcaaaataataatccaccccgtcgacttcattatgccgtctaggccgcgtggtatgggtaaccacttgtggaatttgaaaggcctcttttaaataatggctcaccgttgttttgccactacccgtggcgcccgtaatgactaatagttgttttgtcactattcattcacactcttctattcaggatttaaataaataaaaaagtttggcggcttaatttaagcagacgccaaacttttttattcttttatttaatcttataaacgacgaccaaagtcaggtttgtaatattgcattgacatcgttgttacattttggccttctgttggtgcgtgaacgtatgagccaccaccgatatagatcccaacgtgatgtgctgaaccaacgccaccccagaaaacaaggtcaccaggttgtaattctgataatgacacttttgtcccaaccgtgctttgttcttgtgatgtccgtggtaagctaatgccggccatcttagcagcgtaccaaactaaaccagaacaatcaaaaccaccaggttgtgcgccaccccacgcatacggtgtgccaatgaattgtaaggcattgccaactaatgaaccagtgtttgcaccagatggcgcaactgtcgttgtttttgcaggcgttggtgctggtgtattgtctgaacctgttttaggtgcaaccgttggtgtgattgctgctttttcagtttcttttttagcagcttcaacagcggctgctgtttgagcatctaattgactttgtaagctagcaagctgtgtcttatgtccatccacttcttgttggaaacttgcttgttcattttctgcatctgctttaagtgatgttaactgtgcttgatctttttctaactgtgcttttgtgttaactaagtttgcttttttagtcacttgttcttgttttaaagtagctaatttactttctgagttcgctacggcgtccattgcttccttgttagcttggtttaacttgccaacaactgaagcacgactgaccatatctgagaaactatcactattgacgatgaagtcaacgtaaacatttccagaaacactatccccagcacgtttttgaagcgcaattacttgttcttttaaaacagcttttctagattggacttcagcttgaactttaacgattttttgagccacttcagtaatttctttgtccgttgatgcaatgttcttttgtgcatcatcaattgcaacggtcttatttgacacttggctatcgattgaagcaaccttatcttgtgcagcacttaacttagctaataaagctgagttttcagcactaaggtttgtcattgatgcttttgtatcagcaacttcatcggcactgactgcgccaatgctaaccgccattgttgacccaattgttaagaatgctagtgcactgaacattaatcgactgacttttttcactgaatgattcccctttatcatttttaaaaatacttaacttatgtacggttttccaaccaagaacaagtgtaacattcaactattacagaaatgttacagcttagttaccgtattaagtctaaatcgggaattcacgctacttgttagcggttaacgcggcttgtattttaacccattgctcatgacttagcaaaaccgcggtttcagtcccacttgcatcgacaatttcataaatgagcggtttgacattgacctctttgataatttggttcagcatctttttagcgtatagtgcctgaatttttttacgtaacattttctatactcctcgagcgtgattaattgtgttctcagcacaatcagcttagaataaaagcatcttttattatgaaatgaggtttatgcaaatgcaaatcacaagacatgatcaaccactcgatacaatcggcacaccaccagccgtcggcacacagttaccccaatttgaccttaaaaatgccgctggcgaaacggtgacttctgcgcaattgctcggtaaacggactttaattagcgtcgtgccagacattaacacccgtgtttgcagcattcaaacaaagcattttaaccaagccgtcgatcaattcgaagacgtccatttctacacaatttcaacaaacaccatcgaacaacaaaataactggtgcgctgcagaaggcgttaagaacatgcaactcctttctgatgaggcactcagtttcgggaaagcaatgcaactctacgttccaagcaacaacacgcttcaacgctcaatctttattttggaagcagatggtacaattagctacaccgaattaattatcgaacaaacagacgaaccagattatgcagctgcattaaatttcttaaaggcagctcaataacaaccccaaaacgatggttagaactgactcagtttaaccatcgtttttctttgcggttattatgtaagattattcacaacacccttgataaaacctgagcaatattgctccaccttatgaaatgacgtattatacccgtattagcatctcaaattaaactttattaaggagtccccatgaccgagctatctaacgagcttttccaaactttcaataaggtgattcaccattatcgccattattatggcatgcaattttcatccgatcatcgctcagtcagccaaattcgcattctaaaacgccttaatatcgaaaacggacaaatgcagggagccctcgccgaaagtctcgatattcggccttcatccctaaccgaatgcttgcacaaattagagtctaaacactacattaatcggcggcccgatcatcatgatcggcgaatcacccacgtcttcattacagcggccggtcgagcggttttaaaagaagccctcgatggtcgcaatgaatttacggagactttattcggtagcctaacccccgacgaacaacaagcgctcaacgaacttctaaataatttagaagatacgttagccgacacacagcattttgactttatggctgaattcactaaacgcctcgcccaaaccaaactataatcactggaggaatcgtaatgcgcaagatacttgaatatggtttagccggtgtggtcgcctacctcataagtcgctacttcgtgtggcacattgtcttaccaacactcaacagttatccacgcttaacccgggttatggcccgttttccagcaacgacgctttttctgattctatttttaacccttacattttggttgggttgggtgcaatgggaccgccgacaactatcgccaatctatggttatctcgtctacagcgtctatctgctcttattattcattgtcttattcactaaagcaaacgtctatcatgcagttagcttgaacccgttcgatttcattcaaaaggatcacaaaacactgctcgaagccgcactgaatgtcgtttacttcatcccattaggcggtttgtaccatttgaaagcctcatttgttgaaacgaacatcatagcgctcttaacgattctaggcattgagattctccaattcgccttttatctagggactttcgcactcagtgatatcctcttaaactggtttggctgtttaattgggtttggcctttggacacttgcacaacatcattttacagtccaaacaaaaagcagctaggcattaagccaagctgcttttttaacgattgagcgtaattaactgcttataaagttgattcgttagaagtccgattgaaggattggccttatattgattcgataataagacaattcctgaacgcccatcctgactcatctgcaagctagattcgaatccagattcgactccgtggcttgtaaaataatctttgtaattataaacaccacccgtatattcaccagtagtcgatgagcggagcgtttttaataacgattttttaaaaacttttccttgaacaatcgcctgttcagttcgaaagaggctactcgttgtggcatacatatttccggtccctaactcacgcatatatacgtaacttggttcactaactggcgtgccatagccgccttgttgatagccataagcagtcgcttgttggccggtcgtttcatttggcataaaattaaacgatgttaatttaagcggtattatcaactgatttccaactaactctcgataactcttatgggtgacttgctctaaaatcccggccaaaagaaggtaattaactggcgaataattatgctgaccaatatctttaacagccaaatgatcaagcgcatattgaatccgcgcttgatctgataattctttttctggtgcagataattcagtcagtccagaacgcatatcaaccatcatcttcagcgtaatttgatccgcctctttaatctgcgggtaataccgacttaacggtgtcgctaaatcgatgttcccggcttgcacctgtttcatcaataacgcagccgttaatgacttttgaatcgatgcaatctgatacgtcgtctgtggagaattcagttgcttagtcgcaaaatttgcatagccccggccaccttgaaataacacatgattccgccgcacaattaaaatggtcccgctaaaacggttatcatgtagcaactgctgtacaaattgttgttccttcgcactcaaatgattgatggttcgatcatcaatcccggcttcatgactttttgccttttgaatggctaactcaagttttgttgcctgtaattgttgctgaagttgtttcattttttgttgggtttgttgagtttggacggcatatttttgccgttcatgataaatcgtgccgccaataattagtaggatgagccctaccaacagcagtcctcttttcaatttgttgtccatccgcttagtcctctaatcgtcccttctcaatgactaccatttgagcatcgaatcgataatacagtgcttcaccattttcaacttccacaccatcaatatcgcgatctgaaatctgttcgatcaccttaatgagcgcacgcaaagtagaaccatgcgctacaatcaattggtcctggcctgcaagtaatcctggcactacttgatcttgccaataaggtaatagccgttgcgttgcctgtgcaagactctccccgcgtggccgactcatcggtggaactagtcgataacgacgggcctgcgaaaaagtcgtcaataaaggtgggaccgccgtgtaactacgccgccagcgggcaacttgatgcgcaccaaaaatagcccgcgtcttttccttatttaacccgcgcaatgccccataatggcgctcatttaatcgccaactcttcgtcattggaatggccaattggtctatttcatccagaataatgtaactcgtcaaaattgcacgcttcaataacgaagtatgcacatgactgaattgaattccggttgcttgaatttgtcgacccacatgctgtgcttgtttgcgcccagcagccgttaatggcacatcagaccaaccagtgtaagtatttaattgattggctaaactctcgccatgtcgtacaattactaaattcgccatgcgttaaactcacttttcctgttgtttaaaataatccctttcagtataccacgaaccgtttcccgtgataaataacacgtcatttccctaatttaaaagatcatttaaatagttaaggaactgtacagttttgttgtcatctaccaattaattgtagtacaatgaatctattgaattctaaggatgtgcgatatgtcagctaaagcaaaagaattttggaaatccactatacaaatcattttattagcggccgtgatggtcggcattgcgcaattactgctcaaattcgtcattgccaatgaacaaattttcgggccatcaatgcaacccaactttacacagtatgatcgggtcattgcactacgccatacgaaactgaaacgcggcgacgtcgttatcgtcaaggcccctgattcaccaggtgaattctacattaaacgaattgtcggcatgcccggtgaaactgttcgcttcaacaaggatcaactctatattaatgataaaaaagtcagtgagccttatttaaatgactataaaaaagatccaacaaccttcctagccgggtcaaactacttcacactcaacccaaagactaataagccaaactttgatttaaaggacgtgcttggtcgttccacagtccctgcccaccactacttcgtcatgggtgataaccggactgtttcaaaagatagtcggtatgaagaagtaggctttgtcagtgatgattctaaagccttcaacgggattcaaggcgttgtcaaactccgctactggccagtaacgaaatttaaagtttactaatcacgaaaaaaggtccgccacgattgtggcggaccttctttgaccgtttttttaaagatagacactaacaccgagtaaaataattgctaatagaccaataatcgccattaatggccaaacgaattttaaccacttatcaaacgttacatgggccattgccagcgaggccaagaccaaaccagttggtgtgataaacgacataatgccttgtccccagttataagcactaataataacgtcacgattaacaccgactacatcagccaacggtgccatgacgggcattgatagcaccgctagaccggaactcgacggaatgaagaatcctagtagaatgaaaacgaagaacatcaccgttgagaagataacaccactcatatgggaaacaccactacttaaccagtacaatagcgtatcactaatttgtgcctgttccataataatcgtcacgccgcgtgctaaagcaatcacaagggctacacctaacaggtcggaagcccctgcaacgaattcactaacaaaatctttttccgataatccggaaataaacgccaaaataaacgtaatcgctaagaataacgaggaaatttcattaaatagccaaccccattccttcacgccgaagaccatgatgacaaaaccggccgcaaaaataattaacatcaatttcttccggaaatcaaaccgtggtacttcattgacatcactatttcccaggaaatgtttttccaattctactttttgattataaatgagcgattggcttggatcctgttttactttttcagcataccgaatcgtgtagaaaatacagattaatgtgcctagaatcagcattacaagccttagtcccataccatctgtaaagctaatgccagccgtattagaagcaatcacgacggaaaatgggttcaccgttgaagccattgtcccgattgaactgcctagataaatcgccgcaattgcgactagcgcatcgtagccagctgccataaagattggcactagaattggatagaaagcaattgtttcttcagccaagccaaaggtggtcccgcctagggcaatcaagctcgttacaatcacgattaaccaggcttctttacctttcaaacgtttcgatagcgccgccattccggccgcaaatgcaccggtcttattcacaacgcccacaatcccacctagaattaagacaaatgtgataatatcgattgtttcagataacccttgaatgggcgcattcagaaattgtttaatcgcgccaaataagtttggtttatgctgattgagtttttgatatgtatttggaatcgcaactggtttatacaccgacccatccttaaacttcgctaaatccgtattaacatggtatttcttcagtgttgcttgtgtcccaggtgctgtcgattcatgcccattgggtgcgaccacagtgaagttttcctgggtcgtgttatattgtaaactcgcatattttccggctggcataaagtacgtcaagatcatcactgccagtaaaacaagtagaattactgtgtaggcgctcggaaaagtaaagtgttttttcttatcagtcattcaatagcctccatgacgccctccatcgctgaagagccattttataaactcaattatatcacaaaggacgcttgcgctttttccataacacccttgcacagactactttcctgtgctaagattggcaccaagcaaaataagggacgacagagagcgtcctttttggaggaaaactgaatatgaaaactattacagcacacagccaacatcgattaacaagctaccagactaaggtggtcgcctcaacaacggccggcttcggtctcgaaaacatggacgttatgttcttgtctttcaccctatcgtccatcattgcagatttacatctcagtggaacacaggcgggattaatcgcaacgattaccaatattggaatgttgttaggtggcgttttttttggcgttttagccgaccgcgttggacggattaaaacattcacttacaccatttttatctttgcttttgcgacagcggctatgtcatttgcccacacccttcccatgatttatctctgtcgcttcttagctgggatcggtgctggtggcgaatatgggattggcatgacggtcttagccgaatctttccctaagaaacagctcggacgtgtttcatccttcgtgggtgtcgcaggtcaacttggcgctattgccgcggcacttctagcagcgtgggtcttaccacaatttggttggcatgcactatttctattcggcctattacctgttatcattactttttttatccgccatcatctagtcgaaagtacaacgttcacttctgaatcagatcaaccaaaaggtcagattagcgctctttttaaaacacgcgaactagcttaccaaacagttgcgctgatgataatggcaatcgtccaaatcgctggttacttcggtttaatgaactggttaccaaccatcatgcaacaacaaatgcacctcagtgtggctggttcatcaacttggatgttagcgacgattgccgggatgtcagcaggcatgttgactttcggttggattctagaccgaattggtccacggtttgcttttgtcttattcctgattgcttcagcagcaggcgtttacatcttaaccttccccaatagcatgggtgctttattgttcgtcggtgcaattgtcggctacttctcaaatggtatgtttgcaggctatggcgcgattgtcagtcgcctctacccatccgaagtccgtgcaaccgccaataacgtgattatgaacgttggccgctgtatcggtggattttcgagcgtgattatcggttggttacttgatcattattcggtgatgaccgtgatgctcttcatttcaacactctatatcatcagcttgattatcatgctcaccatcaataatttaaaagctgatcgctactttaatcatcaataacacacaaaagggtcgagacaattgtctcgaccctttttaaatttataaactaccgccgcgtacctcggctacgttagccacaatcgtaaatgccaaaggatcaacttcatgaattcgattaataatgtgttgataggcttgattttcaacaacgagcatcaacatctgcttattgtcattagaatagcccccagtaacatcaaaaatcgtcacgcccacatcagattcttcgattaaatgggctttaatttcaggtaattggtcgttactcatgacatagaggacctttttccggttcaacccggtctcaatatagttcatcgtaatcaacgtcagaattgatgaacaagttgccagcatgaacgtctcaaaaccagagacgaacacattcgcaaagcagactagtaaatcaactaccagcaaactcaatgccggtttgatattgaaatattttttgaaaattaacggtggcactgttgagccaccactcgaggcatcaattcgatataacaaggcaattccggcagcgtaaacaacactcccgataataattgctaatagtttgtcttccaccaccatcatttggggcgttaaagctaaacaaactggtagcataaaactaccaaagagaattcttaacgtggttttcttatcaagtaagaagtaagcaagtatcagcatgccgatgttaatcacaaacaccactgttgatatcttccaccccatcaattcttctaataagatccccacaccggttgccccaccggctgctacttcatggggggcaaagaagagttgaatcccaatcgcaataatttcgagagcaatcaagatcaaccccatctggataatcgtctgtttcaaattggataagcgcatcgcgtccctcatttctttattgattattactataagtatatatgaatattaatgaagatgcgagtctaaccacttcatgcttcccgtagtgcctgtgcgagtgccactaatttacgagcggtgttggcattccgaattgtcagccactggtataggtcccctttagcaacagtcgaccaccgcgtccgaccgaatgttttcacgggtgcactccagaaaataaacggaccattcacggcaactttttcatacgctggcttaattgcccctacacgtacactcaattccgcccccgttttaggcgcaatcgccacgattaaattatgtttcacatctggcatattgccccaccaagttggtgcgtccgcaacagcttgaatcaactggtcagctgtgaccacggcgatattcacagaaaagccaaaggtctccaccataatctgatcacaagttgccgctaaggttgttaagcctgtttctggggcttcaaataacacgttgccactattgatgtatgtttcacattggtgaacccagccgcttcatacgcagttttaagcacgctcattttaactggccgtttaccacccacattaattccccgtaataacgcaatgtattgcatctgaatccctcacttttttattcatcataacttaattagcttttgttgaccagttcgctttatcactgccatatttattattttgtggggaataataatgaaaaaagttttgcaaatagcataaatacgccatttagcttataatagtatagttataaattttcaaaaaaggatggcgcacaatgaacaatcgaactcaaccgcaaaacatcgccaaaggcatgttttgggcgactatggcgtccgcactctggggcgtttcaggtactattttggaattcatctcgcaaggacaaaagatccctgcaacttggttcctatccgttagaacgcttggcgctggtttaattttattacttatcggggcaattaagttcaaacaagatatcttctccatttttaaatcaaaacgattaacggcttggctaatcgcttacgcccttttcggtatcatgggtaatcaatatactttcttcatgagtatccaaacggggaatgcagcagcggcgactattttacaatatctaagtcctctgtttatcgttattggaaccctcgctttcttacgtaagtggccaaatcgaattgatattatctcattcggaattgctttaattggcgttttcctttctattacgaaaggcaatatccatactttaacaattccttttaattcattaatctggggaatcttatccggtgtaacagctgctttctacgttgtgctaccaagaccaatcgttaatgaaaaatcaccaattctcgttttaggttggggcatgttcatcagtggtttactcttcaatatccaccgaccattctggcaagcaccgccgcgtttaaatgcttccggtattatcgcaattttagccgttattttgattggaactgtattcgcatatctttgcttgttacacagtttaaactttgcaccatcaaccgtaatcagtatcgttgatgccgtacaacctgtaattacatttattctaagtatcatcttcttccatgcccactttagttgggtagaaacgagtggtgcaattctagttatcctagcaatctacatcttgcaacgttatcaggaaacagaaaatgacgccttagcatagcaaaaagccgtttaaccatcccataagggactgttaaacggctttttaattacgatgcgctatattttacttagcttaatcctactcacagctagtagggttcttcataggccacgtaaacatcctgagtaacactaagtatctcattagctaatagctgcaggttaatcactactctctcttggaaaaaactgatggtaacaaaaaaggttaaacctttcggcccaacctttttatatttgcgcggcaacgtcctatcctcgcaggtagtttcccaccaactactatcggcgctaagaagcttaacttctgtgttcgacatgggaacaggtgtatccttcttgctatcgccaccacactattttgtgcttgcgcactgagaagaacttcgttctctcaaaactgcataataagtaatatttcatttcaaaagcctaacattgcacctttggttaagtcctcgaccgattagtactagtccgctccatacatcgctgtacttccactcctagcctatctacctgatcatctttcaggggtcttacttccataaaggaatgggaaatctcatctcgaggggggcttcacacttagatgctttcagcgtttatcccgtccatacatagctacccagcgatgcgcctggcggcacaactggtacaccagaggtatgtccatcccggtcctctcgtactaaggacagctcctctcaaatttcctgcgcccgcgacggatagggaccgaactgtctcacgacgttctgaacccagctcgcgtaccgctttaatgggcgaacagcccaacccttgggaccgactacagccccaggatgcgatgagccgacatcgaggtgccaaacctccccgtcgatgtggactcttgggggagataagcctgttatccccagggtagcttttatccgttgagcgatggcccttccatacggaaccaccggatcactaagtccgactttcgtccctgctcgatttgtcaatctcacagtcaagctctcttatacctttacactctacgaatgatttccaaccattctgagagaacctttgagcgcctccgttacactttaggaggcgaccgccccagtcaaactgcccacctgacactgtctcccgccacgctaagtggcgcgggttagagtggtcatacagttagggtagtatcccaccaacgcctccatcgaaactagcgttccgatttctacggctcctacctatcctgtacaaactgtacaaacactcaatatcaagctacagtaaagctccatggggtctttccgtcctgtcgcgggtaacccgcatcttcacgggtattataatttcaccgagtctctcgttgagacagtgcccaaatcattacgcctttcgtgcgggtcggaacttacccgacaaggaatttcgctaccttaggaccgttatagttacggccgccgtttactggggcttcaattctgggcttcgcttacgctaactcatcctcttaaccttccagcaccgggcaggcgtcagcccctatacgtcatctttcgattttgcagagacctgtgtttttgataaacagttgtttgggcctattcactgcggctgacctgacggtcagcaccccttctcccgaagttacggggtcattttgccgagttccttaacgagagttcactcgctcaccttaggatattctcctcgaccacctgtgtcggtttacggtacgggtagtttatttctcactagaagcttttcttggcagtgtaacatcaggaacttcgctacttaatttcgctccccatcacaacttgtccttaaagaatcaaacatttcactcaactcaagacttgttgcttagacacacatttccagtcgtgtgcattccttagcttcctgcgtccctccatcgttcaaacaaaataaactagtacaggaatctcaacctgttggccatcgactacgcctttcggcctcgccttaggtcccgactaaccctgggaggacgagccttccccaggaaaccttagtcatacggtggatcagattctcactgatctttcgctactcatgccggcattctcacttctaagcgctccactagtccttacgatctagcttcatcgcccttagaacgctctcctaccgcggacacttacgtgtccacccacagtttcggtattatgtttagccccggtacattttcggcgcagcggcactcgactagtgagctattacgcactctttaaatggtggctgcttctgagccaacatcctagttgtctgtgcaccgccacatccttttccacttaacataaattttgggaccttaactggtgatctgggctgtttccctttcgactacggatcttatcactcgcagtctgactcccggaactaaatcaatggtattcggagtttatctgaattcagtaacccatgacgggcccctagtccaaacagtgctctacctccatgatccaatattccgaggctagccctaaagctatttcggagagaaccagctatctccaagttcgattggaatttcaccgctacccacacctcatccccgccattttcaactgacgtgggttcggtcctccagtgtgttttaccacaccttcaacctggacatgggtaggtcacttggtttcgggtctacatctatatactcactcgcccatttcagactcgctttcgctacggctccagcttttcactttaacctcgcatataaacgtaactcgccggttcattctacaaaaggcacgccatcactcattaacgagctttgactaattgtaggcacacggtttcaggatctatttcactccccttccggggtgcttttcacctttccctcacggtactggttcactatcggtcactagggagtatttagccttgggagatggtcctcccggattccgacggaatttcacgtgttccgccgtactcaggatccagaacggaggttaagttgtttaatctacgtggttatcacactctttgactcagcttcccagctgattcgattacaacttaacttggtaactccaatgttctgtcctacaaccccaagaagcaagcttcttggtttgggctcttccccgttcgctcgccgctacttagggaatcgatttttctttctcttcctgcaggtacttagatgtttcagttccccgcgtctaccttcattaagctatgtattcacttaatgataatacccgactaaaggtattgggttcccccattcggaaatctccggatcaaagcttacttacagctccccgaagcatatcggtgttagtaccgtccttcatcggctcctagtgccaaggcatccaccgtgcgccctttataacttaacctaactttacctacggtaaagggttattatttgagtttagcgatatgaactaattcatatttctattaaaaaactctttaaaacgcaatgttttctcggcttttaaaactaatatattacttattatccagttttcaaagaacaaagtttgagagtagacctctcaaaactaaacaaagtttcgacttcgcaaatgtacaaggttttccgtattattccttagaaaggaggtgatccagccgcaggttctcctacggctaccttgttacgacttcaccctaatcatctgtcccaccttagacggctggctcccgaaggttacctcaccggctttgggtgttacaaactctcatggtgtgacgggcggtgtgtacaaggcccgggaacgtattcaccgcggcatgctgatccgcgattactagcgattccggcttcatgtaggcgagttgcagcctacaatccgaactgagaatggttttaagagattagctaaacctcgcggtctcgcgactcgttgtaccatccattgtagcacgtgtgtagcccaggtcataaggggcatgatgatttgacgtcgtccccaccttcctccggtttgtcaccggcagtctcactagagtgcccaactaaatgctggcaactagtaataagggttgcgctcgttgcgggacttaacccaacatctcacgacacgagctgacgacaaccatgcaccacctgtcactttgtccccgaagggaaagctctatctctagagtggtcaaaggatgtcaagacctggtaaggttcttcgcgttgcttcgaattaaaccacatgctccaccgcttgtgcgggcccccgtcaattcctttgagtttcaaccttgcggtcgtactccccaggcggagtgcttaatgcgttagctgcggcactgaagggcggaaaccctccaacacctagcactcatcgtttacggcatggactaccagggtatctaatcctgtttgctacccatgctttcgagcctcagcgtcagttacagaccagacagccgccttcgccactggtgttcttccatatatctacgcatttcaccgctacacatggagttccactgtcctcttctgcactcaagtttcccagtttccgatgcacttcttcggttgagccgaaggctttcacatcagacttaagaaaccgcctgcgctcgctttacgcccaataaatccggacaacgcttgccacctacgtattaccgcggctgctggcacgtagttagccgtggctttctggttggataccgtcactacctgatcagttactatcaaatacgttcttctccaacaacagagttttacgatccgaaaaccttcttcactcacgcggcgttgctccatcagactttcgtccattgtggaagattccctactgctgcctcccgtaggagtctgggccgtgtctcagtcccagtgtggccgattaccctctcaggtcggctatgcatcacggtcttggtgagcctttacctcaccaactaactaatgcaccgcgggtccatcctaaagtgatagccgaaaccatctttcaaccttgcaccatgcggtgctaggttttatgcggtattagcatctgtttccaaatgttatcccccactttagggcaggttacccacgtgttactcacccgtccgccactcactcaaatgttatcaatcagaagcaagcttcttcaatctaacgaaagtgcgttcgacttgcatgtattaggcacgccgccagcgttcgtcctgagccaggatcaaactctcgattaaaagtttgtagctcttgttttgttacttaatttatttgctagcgaaattgactttgcaaatatgttttgtgccccgaagggcgaccctacacatttggtttgtcgaaactttgttcagttttcaaagatctactgtgttgaaacagctttttaagtatatcacacaacttatcgtctgtcaacaactatttttaattaattattacttagaagttataactccttaagcaacatataatatgttatcatgttttcaattaaataacaagtgtttttcaaaactttttatttaattgacgatactgcttatcactaatcagctcgcttttgacaactttattagtataccaacttgcaacccgtgatgcaaggattttctgtaaataaataataattatcttataacaataaaaaaggcccttagctatactaggggccttcgtttttctactattaaacgtagaggtttttaacttgtttttgtaattccggatgtgctaagaactcatcatagttcgtttcagcacgttcgacaacaccgttcgctgatacttcaatgatatgatctgcaattgtttgaataaactgatgatcatgcgatgtaaagactaaagcacccttgaaatcgatcaaagcatcattcaatgaagtaattgattccaagtccaaatggttggttggatcatctaatagtaaagtattcgatttttgcaacataatcttcgatagaatacaacgcactttttcgccaccagaaaggacattgatttcttttgtgacttcatctccagagaaaagcatcttgcctaagaaaccacgtaagaaagtattgtcatcttcacccttagcggcaaattgacgtaaccagtctaagatgatgagttgatcatcattgaaggctgagttcgtatctcttggtaagtatgattgttgacttgtcacaccccaggtaactgtcccagtatctggctgcacttcacctgctaagatttgcattaagacagctgtcgcaacgtcatttcgtgaaacgattgctgctttttcgtctggcttaactgaaaagctgatgttatctaacactttaacaccgtcgattgtttttgaaacattctcaacccgtaaaagatcattccccaattcacgttcgaaatcgaacttaatgaatgggtattgacgtgaagagggttggatatcttctaatgtaatcttttctaattgtttcttacgagaagtggcttgttttgattttgaagcattggcactaaaacgcgcgataaaatcttgtaattctttgatttgttcttcttttttagcgttaacgtttgattgtaacttagcggctaacttacttgattctaaccagaagtcgtagttcccaacgaatgtcttgatgcgaccgaagtccacatcacacatcattgtacagacttggtttaagaagtaacggtcatgggaaacaacaatcacgatgttcgggaagtctgctaagaaatcttctaaccattcaactgaggcactgtccaacccattcgttggttcatctaataataggatatcaggtttgccaaagagcgcttgaccaagtaaaaccttaatcttttgcccttccatcaattcactcatcttcacatggtgtaaagattcatcaatccctaaggcttgaagtaattgagcagcttctgattcagcatcccaaccattcatttcagcgaattcagcttctaaatcagcagctttcatcccatcttcttcagtgaaatcagctttagcatatagggcatccttagcttgcatcacttcatacaacttcttatgaccttgaatcacagtctctaacacttcaaattcttcaaaagcgtagtgatcttggttcaaactcgacatccgttcattagggcccattgagatatggcctgatgatggttgtaatttaccttctaataattttagaaaagttgacttacctgcaccattggcaccgatcacgccataacaattcccaggtgtaaacttcaaattaacgtcttcatataacttacgcccagaaagcgttaagctcatttcactaacagttatcacttgattccctcacttttctttcatgactctaaaaagccaaccgtttcatgtgaaacggctggctttctaccattgacaatatatgcttaactctaacatatctaatgactagttatcaaccaggctatttgaccttagcaatcttaccttgttgaatatagacacttagaatcccgatatcggctgggttgaccccaccaatccgactggcttgcgcaagtgtttcgggttgaattttttgtaatttttgacgaccttctgttgcaaggccttcaattgcatcgtaatcgatattggctggaatctttttagcttccattcgttttaacttcgcaattttagctttttccttatcgatgtaacccgcgtatttgatttgaatttcaacttgttccacaacgcggttatcaatgccttcgactgctggaataaattggattaaatcagcatactttacttctggccgttttaagaagtcgctggctaaaacaccatctttaagtggtgcctcacccttagccgctaaaaaggcttggatttctggggttggtttcaagcgaatggttgctaaacgtgctaattcagcttcaacggctgcttttttcacttcatagctgtcaaagcgatcatcattgattaagcctaatgcatgacccttttctgttaagcgtaaatccgcattatcgtgacgaagcatcaaacggtattccgcacgtgaggttaatagccgataaggttccttcgtcccctttgtgaccaagtcatcgattaagaccccgatgtaagcttcactgcggtccaagatgaatgggtcgcggcccgtttgcttcagagcagcgttgatgccggccatcaagccttgaccagccgcttcttcatatcctgaagtgccgttcatttgaccggctgtataaagattttcaaccactttggtttcaagggttggttttagttgccatggttcaacgacatcatattcaatcgcataaccaggacgcatcatttgggcattttctaagccttcaatcgaatgaatcattttgtgttggatttcttctggcattgaggttgagaaatcaccgacgtaatattcttctgtttcgcggccttctggctccaagaaaatttggtgccgaggcttatccgcgaagcggacgattttatcttcaattgaagggcaataacgtggacccaccccttcaattacgccggtaaacattggggcgcggtcgagattgtcgcgaatcacttgatgcgtcgtatcattcgtgtatgtcatccaacaagaaagttggtctttcaaataagcactatcaggtgtttcgaaactaaagtggtttggttccttatcccctggttgttcttccgtctttgaaaagtcgatcgtggtgccgtccacgcgtggtggggtccccgttttaaaacgcgtgaggacaaatccgttgtcttccaaactttcagaaagtttaatagaaggaattgaattattcggaccagatgaataggttaattcgccgataataatcttaccccgagaagctgtcccagccgttaagatcacactatcagcgctgtaacgggcaccagtgttagtgacaatccctttgcagacaccgtcttcaacgatcaatgattcagcaatcccttgacgaagtgttaagtgctccgtcgtttcgatagtccgtttcattgtccggtgataagcgtgcttgtcagcttgggcgcgtaacgcgcggacagctggccctttacctgtattcaacatccgcatttgaatgtatgttttatcaatattgcggcccatttgaccacccaaggcgtcaatttcacggacgacaatccctttagcaggaccacccaatgatgggttacatggcataaaagccaccatgtctaagttaatcgttaatagtaatgtttcgcggcccattcgtgcagcagctaaagccgcttcagaacctgcatggccggcaccaacaacaatcacgtcgtagtgcgctgcgtcatattctcgcatattttgttctcctttaatatggttcaagacctatttacctaaacagaattggctaaagagttccgtaatcaattcatctggtgctgaatccccggtaatctcaccgagcttatcccaacagttggtcatatcaatttgcacaaggtcaactggcatcccagctgcaattccactgatgacttcatctaatgattgttgtgcttggtttaatagaccaatttggcgggcattagtaatcatgaccgtactttgactattttcaatcccaccgaagaagagtttggcgatttgggcttccaaatcggtcaccccttcgcttgttaaaatagaagtttgaattacttcatccgcattcaccaatgtttggagttcatttaagtctaacaagttcggtaaatcggttttatttaaaataatgatccgtttcttatcagtggtggccgtgattaactcgcgatcttcaaccgttagtggttcactttgatttaaaactaataaaatcaggtcagccttggtaattgctgcgcgacttctttcgaccccaatcttttctaccttatcttcggtatcatgaattcctgccgtatcaacaagcttcagcggtaccccacggacgttgacatattcttccaaaacatcacgcgtcgtcccggcaacatccgtcacaatcgccttatcttcatgtaataggtgattcaacaaacttgatttaccaacattgggccgtccgacaatggccgttgctaggccttcacgtaagacttttccttgttgtgccgtttgaagtagttcaccaatccgcgctttcacaagttcggctttttcaagtagaatccgcgtcgtcatttcatcggtatcatattcgggatagtcaatgttgacttcaacttgcgccaatacttctaagatttcttggcgtaaattcttaatcaggtgcgttaaactcccatctaattgatcaacagcaacttgcatcgcccgatcagtcttagcccgaatcagatccatcacagattcagcttgggttaaatcaatccgcccatttaaaaaggctcgtttcgtgaattcacccggttcggccattcgtgcaccatagctcattaataattgtaagatgcggttcgttgcgacaattccgccatgacaattaatctcaatcacatcttcgcgggtaaacgttttgggtgcgcgcatgacagacaccatgacttcatcgactactgcgtcggttttaggatcgataatgtgcccataattaatggtatggctcgccacttgatcaagatctttgccgcgataaacgcgtttaataatggctaaactctcatcccctgaaagacgcacaattgaaattgccccctcaccaggtggtgttgaaatcgccgtaatcgtatcaaattctgtgactgtcgttggcattttaaatgcttcctttccgaaatagctgcataaaaaaagcgcttagcatccacccctcccgtcattgcgtaaggggtggacaaagcactttcactactttatcgatatttaattagtttcattatacacgatttttttagagcgtcaattcacaacacctaaaatgtgcgcgctaattccaccacaattgaccggcgatcgccttggccttctgaatgagtttgaacatggtgattagttgctaaatgcccatgcacaattttgcgttcaaaagccggcattggttctaaaaagactggtttgccggtcgcaacgacttcacgggctgctttatcggcaaggtggctgacaatcgctgctcttcgctgccgataatcaccaacttctaggataatggtttgcttgcccttcatatgatgatcaaagtaagtctgcgctaaatattggagtgcattaattgtcttaccatgcttaccaatcaacaagccttctttatcggtcttcaaatgataagtcgtactccgatggtcgtgagttacatgaatgctgaccggtgtgccaatttgagccgtgatggcttccaaataggcgcttaactcagcttccgtttccacaccacttttccgcttttgcggcgtactagttaaattgtctattggcgttggttcaactagctcttgaactggggctggggcgctttgtttaacttggcttggttgttcatttggcgttagccggacaactgctaagcggcgaccaaaaccgagaaacccttttttgccggcttccaatacatcaacggacacttcctcacgcgttagatgcatagcttgcaacccttcatttaccgctgcttgaatatcgctaccttcatatgttggcatttcaaaacctccgatcaatttggtcactccaactagtgtgagcgtccgattctcgtttattataccatgatataccaatttaaaaatagcatgtcattatctgagataatccgccgtcaaagctaagaattgttgtacatctttagcgatgctatccgcggcagcttgccagaaatccggttgggttaaatcaaccccaagatgtttttgcgctaatgcttcagtcgacatattggccgtatcacgtaatagtgcgatatagtccgcttcaaaatcaggcattgtctgtgccttggcataaatccccatcgaaaaaagatagccaaacgtataagggaagttataaaacggcacgtcatcgaagaagaaatgctgtttgtccgcccagaatagcggatcataatcagtcaacgcatccgcataggcttctttttgagcggctagcatgagtgcttttaaatcagctgttgtttgcaggccattttggcgcgctgtataaaaatgttgctcgaataaaaaccgtgcgtgaatattcataaacatatcaattgcgttagtaattttctgatccaataaattaatcttcgctgctggggtttgcgctgctttaacagtcgcatcactgacgattaattcagcaaaagtggaagctgtttccgcgacgttcatcgcatagtcttgtcgccaacttggtaaatcattaatcatcattgtatggaacccatgccctaattcatgtgccaaagttgcaacaccattgggggtgccatcaaatgtcataaaaatccgaaaatcatccgtttcaggtaaatcagtcatataaccacctggttgtttgcctggccgatcttcagcttcaatccaacgcttttcaaacgcggtttgtgccaccgaagccatcttgggactgaacgctttaaagttctgcatgataaaatccgctgcttcatcataagaataacgctgcggttgaaaatcacctacaaccactggtgcccaggtatcataccaagcaagctgttctttgcccattaacgctgccttccgatttagaaaatcgacaagcggcgctttattttgactaacgatcgaccacatcgcttctaacgttgcgggttgcatgcgactcgttgccaatggctttttcaaaaagtccgttgtgccatgtgcttgataatccgttaggcggaagccagccaaatgatttaacgtatccgttaataatggtgaataccgatcccaagtctggtaccaattttgaaagacgcgttggcgtaccttgggatctggatcagattcaaatttattctgcgcttgtcccgccgataaagtcgtctcaccatcggggacttgaatttcagcaaccaatgagtcgtaatgatcactccatccagttaaaccatctaacgcgaactggttaattagtttttccgtcgcttcatccaaaagttcagcaccattcgtccgtttttcggttagattaaactgaatcgcttgtaaggcaggtgtcgatacaacggttttaaaatctgcgtctgacattgcgaccaatttttttgtgagtgcgacatcaatctgattcgcatcattttcaagcgcattaatccgccccatcatcggtgcaacttgcggattgcgttcatccgttgattgaatcatattcacgaaactccccgtttgcttgagacccgcttcaatcgcttgtaactgttcagtgatttgcgttagcgttgcaaatgttggctgatctgtcgcaaacgtccagttctggaccgcttctaataagggcgtcatttgtgcagtcaaatccgccaatcgttgcgtcaacgctggtgaatcaatccccccggcaaaaatcggttctaaatcccattgttctgaataggtcatctctttatcctccacttttaaacgattgcacttattatagcgaaatttcgcgcaaagcgcgattaattcaaccagatccactagacattttgataatatctgttaaattaggaatggaagcagatacatagctgctagaaaggcgatgtttatgatgacgattgaacaagtacccgctaatacaatcgcagatttaaaaacactgttaaaaacgacccaagtgcccgataaaattatggcaatgggacccgaactgatccaatacttaacccatattaaggcgagtcaattatcagacaccgaccatcttgggttcgatttagggagtgccggcattttaacgttaatcgaacaagtcaatacagcctttttcgatcacttccatatgtttgacgatgctgcaccgattgaaccaaagttaacgcgtaaaattctagtgctttatcatctaaaaccgattgatgatcagcacttcctccttcatttgaaacaattagactattaaacagcaaaaaatcgtaaccaaatcggttacgatttttttattcttaaagatttttgaatgattattagtcttgaaattagttatcgattattaccaatcatgatgctactataaaattaagaaaacggtttaaaaccaattttaacaatttatctatctgaatttctattttttaatctagcgctatggaggattagccattgaaactatttctttttatattaacaacactcctttatttgctattagattatttaatgctaacctttccacctgtcgaaggggtggctcagaatgttcccctcatccttttaccattctgttatttttttggatcccgattcttgctgagaaaaacaacgattaaccgccataaaaacgggttacttattggtgccgtttgtgtcgtctgcgctatcgcaattcctcttgtacttgctgcctattacctattctaaaaaagaccaatcataatgaaaattcattatgattggtcttttaattttggaaattaacgtttcttagttgctttcttacgtgctttagcaagtgctttttcacgatcacgcttttctttttccttggcttcgcgttcgcggcgaatcttaaatggattttgaatcaccattgtttgacccactgaaaaggcgttcgttaccacccagtaaattgaaacagcagacgcgatgttcatcgccatcacaaaaatcatgattggcatcacccacaacattgcggatgacgcagcattcttcgtgggttgcgacatcattgttagatacgatgttgcaaacgtaaagatcgcagccaagatggccataataaagtaaggatcagctttcccaagttgcatccataagaacgtcccactctttaaagcagctgttcgatagatcgcttggtacaaggcaatcaacactggcatttgaaccactagtggtaaacagcccacaactggattgacgcccgcttcagcatatagcttttgcgtttcttcgcgtaatttctgttgtgtctcagcatctttagaagcatatttcttttgaagtgcttgaatttctggtgcaacttcttgttgtttgagcatgctcttactttgccaccaagttaatggcaagataatcacccgaatgatgatggtgaaggccacaattgcccaaccataactgccaccaaagatgtctgctaaccataaaataaagcgggaaaagttataaataacataatgatcccagaagccagtactgctactatcaactggtgatgtactacaccccgctgcgattagcatgaacaagaatagactggccactaataatagccgtttgcgattttttgaactcactgtaatccctcacttattcagaagcagaatctgcttcttcctttaatagctttgctagttttaagacgtgcattaaattctgtttggtttccgccattgttagttggttagcgccgcgtcttgcgatcactaaaaagtcgacagtctgtggtaactctggcttcaactccaacaagctctggcgaatgtaacgtttaacctgattacgcatcactgcgttacccacttttttacctacggacaggcccacccgaaaatgcttttgaccaggtttttctaattgataaaccacaaaattgcggttggcaactgaatgacctgcttcaaaaaccgtttggaaatcctgttcttttttgacgcggtacgactttctcataattcactccggcatttcatttaattaattgaggataataaaaaaaccactgaagcatcagtggcctatgcagataatacttttctgcctttagcacggcgtcttgcaagtaccttgcgaccgttcttagtattcatacgtttcatgaaaccatgaacacgttctttatggcgtttctttggttggaaagttctctttgtagtcattatactggcacctcctaattgactgtgtctattgttttcatatctgagaaacaacgggtgataaataccacctacgacattcactaaaatataatagcatatttctatagaagttaaaacactttccataaaaaaacagcataaatattcttatccacaaaaaataattcattggatttcttgtggataactgattataccgaatcgtccgatttttgtcacgcacagattacttgctgatttatccagaaaatcacaggctgttactatgttatccacaagctattttcaagctgtgcataaattgataaaaccttttaatagcaagcatcagatacacacacttttttgtggataagtgcgataatcgtttgttgttttctgttttccacagtccccactaaaagttatccccggtcgtgtgttcaagtggataactttttaattcattcctgtggattttgttcttgttgtggaaaacttttttttagaatgctagaatgtagatagtctttctttattgaactttttttcaataaagtggttattttacgtgaggaggacacgctacatgcctgatcttcaggaactttggaactatttgcgggaagaattccaaaatgatttaacacccgtcggttttaatgcttggattaaaaccgccaaaccgcttgcttttagagccaatgaaatactgatcgaagtgccttctcctttacacaaagagtattgggaaagtaacttggccactaaggtcgttgaaggggcctacgaattcgcagagattgaattgacccctatttttctgttacctaccgaagccgagcagcttcaagctgaaaaaccagctgaagaacgcagcctcaccaaagctgaaaccccaacctttttacgtgaaacgcatttaaatagtaaatacacgttcgacacgtttgtgactgggaaaggcaatcagatggcccacgctgcagcactcgttgtttcagaagaacccggtgttttatataatccactttttttatacggtggcgttggtttaggtaaaacccatttgatgcaagctatcggtcaccagctgttactctctaaacctgacacgaacgtcaagtatgtgacgagtgaagcttttgccaacgacttcatcaattcgattcaaacgaagaatcaagaaaaattccgccaagaataccgaaacgttgatttattattggtcgatgatattcaattttttgcggataaagaagggactcaggaagagtttttccataccttcaatgatctctacaatgataaaaagcaaattgtcttaacatctgatcgtttacctaatgaaattcctaagctccaagaacgcttagtttcacggtttaaatggggcttgtccgtcgacattacgccgcctgatctggaaactcgaattgctattttacggaacaaagccgacacagaacgcctcgaaatcccagaagatactttgagctacatcgctggtcaaattgattccaacgtccgtgaacttgaaggttcactggttcgggttcaagcttatgcaaccatgcaaaatgctgaaattacaactagtcttgccgccgatgcccttaaaggcttgaaactcaatgggaagtcgagtcaactttcaattgctaagattcaatccgtagtcgctaagtactacagcctttcaatcactgatttaaaagggcgcaagcgcgttaaagaaattgtgctcccacggcaaatcgctatgtacttggcccgcgaaatgaccgacagttctcttcccaaaattggacaagaatttggcggtaaagatcatacaacagttatgcacgctcatgaacgaattagccaagctttaacgagtgatcaaaatctaaaagatgccatcttagatttgaagaataccttaaaaggctaaatataggctgtggataaacgctaaagttatcctaagagttgttctcaacttatccacaagtggaaaactagacactcttttgcttttctatgttatccacaggttccacaggccctactactattacttaaaattcttttataatctatatatctattttccttcggaggtttaacatccatgaaattctcaattaaccgcaacgtgttcatcaaaacccttaatgatgttcaacgtgccatttcagctaaaacaacgattcctattttaacggggcttaaattagtgctttcgcaagaaggcttaaccttaaccggtagtgatgctgatatttcaattgaagcaacccttgctagtaatgatgaaaagaatcaattagtcgttgaagaagcaggtgccattgttttaccagcccgcttctttagtgaaatcgttaaaaaattacctgaagatcaaatgacgattgctgttggtgacaacttccaaacaaccattcgttcaggtaaatcagaatttacaattaatggcttagatgctaatagttatccacatctacctgaaattgcgggacaaaatccgttcagtatcagtactgatgtgcttaaacaattaattcatcaaaccgtcatcgctgtttctaaccaagaaagtcgcccaatcttaacgggggttcatttggttttaaaagatggcgaaatgttagccgtcgcaacggacagtcatcgacttgcacaacgaaaattaaccgtttcagtaccaagtgatgggaactacgatgtcattattcctgggaagagtttaattgaactttcaagaacgttagcagacgaagttgaaaccgttgaaattcggattgctgaaaaccaagtgctctttaaagccggtaacttagccttttattctcggttgttagaaggaaattaccctgacacagcacgtttaattccaacttcttcaagtacacaaatcgaattcaatgcaccggtcttattagctgcgattgaacgggcatcattgttgtctcatgaaagtcggaacaatgttgtccggttgacattgaatacaacggacaacacggcaatcatctacgggaactcaccggacgttgggaatgttgaagaagcccttcaatttgaaaacctaacgggcgaagatctcgaaatttcatttaacccagattatatgaaggatgctttacgttcatttggtcaaacaaccatcgtgattaactttacggcagctttacggccatttacattggtcccaagtgaagatcaagaacactacattcaattaatcacaccagttcggacattttaataatcaaaaaacgccgcatttaaaaatggggctttttttttgcgctaaaattaaaataaattcgtttacagcgatttcggataaaacaagtaggataaggttaaagcacttaaaaacgctcagaaagcattttagctgtgtttatttgtttttaaggcaaaaaaagtctataattgtaaggtataacagatcggtattagcgcagtaattaatatcgttaagaatggtgggttgagtatggcacaagaaattaaacttgaagctgagtttgtgacactcgggcaactccttaaagaggccggtgtgattgaaacaggtgggcaagcaaaatggtttttaaaagaaacaacggttttagtgaacggagaacctgatgatcgtcgcggccggaagttatatctggaagacgtcgttgaggtgcccgataacggccagtttgtcattaaacaacaagaaagattgtaggcgactatgtatttaagtgaactccaacttgatcattatcggaattacgagcaagtggacgtccatttctcgccagatatcaatgtcttgattggtgaaaatgcgcagggcaaaacgaacttgctagaagccatctatgtgttggctttggctcgttcgcatcggacgaataatgatcgtgaactgatacaatgggatggcgaattcgcaaagattaccggcttggtacaacggcaaactggccacacaccattagaattggtggtcagtcaaaaaggtaaaaaagcgaaggtcaatcatttagaacaggctaagttatcccaatatatcggtcaattgaatgtcgtcttgtttgcaccggaggatttgaatatcgtaaaaggctcgccagctgtccgacgacgctttatcgatatggaattcggtcaaatgagtgcgaagtacctgtataacatttcgcaatacaagtcgattttgaaacagcggaatcagtatttgaagcaactacaacgacgtcaagctaaagatttagtgtatttaggcgtattgtccgaccagttagccgcttatggcgcggaagtcacggttgctcgccgtgaatttctgcaacagatggagaagtgggcgcagaagttgcatcaagagattaccaaagagcgggaagttttgacctttaaataccaaagtcagattccagatgagcagttggtacttgatgccgaaggtttataccaacagtttcaaaccttatacgagtcgcaccaaacacgggaagtcgaacagggcacgacattggttggcccgcaccgcgacgacgtgttatttttggttaacggtaaggacgtgcaatcgtttggctctcaaggccaacagcgcacaaccgcgttaagtgttaaattggcggaaattgacctaatgaaggaacaaaccggtgaatatcccgtcctattactggacgatgtgttgtccgagcttgacgatttacgccaaacacacttattgaaaacgttccagaataaggtgcagacgttcttaacgacaactagtcttgaaaatgtcaaaaaagaaattattagtgcgccacgggtgtttaccgtgacaaacggcaccgtgacagtggccgatgcagcagcaaattagtcaaaaaacgatcaaacggaggtttttttcttggcagatgatcaaatgaatcaagagacagaagcacaaatggaagcaaaagaagaacgcgctaaatcttatgatgccagtcaaattcaggtgttagaaggcctagaagccgttcgtaaacgaccagggatgtacattgggacaacgagttcccaagggttgcatcatttggtttgggaaattattgataatgggattgatgaagcactcgctggttttgcaacagaaatcaacgtggttgttgaacccgataatagtattacagttacagatgatgggcgtgggattccagttgggattcaagctaagactggtaagtctgcgctcgaaaccgtctttacaatcttgcatgccggtggaaaattcggcggcggcggatacaaagtatctggtgggttgcatggtgttggggcttcggtcgttaatgccttgtcaacggaattagatgcggttgttactcaaggcggtaaacgctactacatcgatttcaagcgggggaaagtgcaaacgccaatgaagatgattggtgacgcaccagcccatgaacatggtacgaaagttcattttgtccctgatgctgatatctttactgaaacaacggtgtatgatgataaaattttaacaacgcggattcgggaattggccttcttaaacaaaggcttgaagttaacgttcaccgacaaacgggctgaaacacatgaaaaacttgaattccactatgaaggtgggattaagagttacgttgaatatttagacgacaaaaaagagacccttttagacgaaccaatctatgttgaaggtgaacaaaacgggattaccgtggaagttgctttgcaatatacgaatgattatcggacgaacttgatgacctttgccaataacattcatacctacgaaggtgggactcatgaatctggctttaagacggcgctcacgcgggttattaatgactacgcaaccaagcaaaacatcttaaaagccaacgacacgaacctttctggggaagatgtgcgtgaaggcttaacagcggttgtctcggttaaacatccggatcctcaatttgaaggtcaaacgaagacgaaattaggcaatgccgacgcacggacggtgactgatcggatgttctctgatcatttcacgaagttcttgatggaaaacccatcgattgcccgccaaattgtcgacaaaggctcattggctgccaaagcccggttagctgctaaacgcgctcgtgaagtgacacggaagaagaacggtcttgaaatctcaaacttgccaggtaagttggccgataatagtagtaaagatcctgctatttcagaattattcatcgtcgaaggggattccgctgggggttcagcaaaatcaggccgttcacgtttaacgcaagccatcttgccaattcgggggaaaatcctgaatgttgaaaaagctagcatggaaaaaattttggcgaatgatgaaatccggaccttatttacagcaatgggcactggttttggccaagaattcgatgtggctaaagcccgttatcataagttgatcatcatgaccgatgccgatgtcgatggtgcgcatattcggacgttgcttttaacgttgttctaccgttacatgcgaccaatcgtcgaagcgggttacgtgtatatcgcacaaccacctttgtaccgtgttaaacaagggaagatgatgcgctatattgattctgatgaagaattacaagaagtgttagggacgctccaaccaagtcctaaacctgaagtgcaacgttacaaagggttaggggaaatggatgctagccaattatgggaaacaaccatggatcctgaaaaccggcgcatgttgcgggttaacgttgaagatgccgaagaagcggatcaaatttttgaaatgttaatgggcgatcgggttgaacctcgtcggattttcattgaagaaaatgccgtttacatggatccaaagagcatcgatgcatagcgtgttcgccgcttaaacggacacattgaaagactgactgagaggggtttatagattaatggcaaacgaaattggccaagacggtcggattgaaaacgtcaatttatctaagacaatgcgtaaatcattcctggaatatgcaatgagtgtcattgttgcgcgtgccttaccagacgttcgtgatgggttaaaacctgttcaacgccgaattttatacggaatgaatgaattagggatcactcccgaaaagccttacaagaaatctgccagaattgttggggatgttatggggaagtaccatccacatggtgattcagcgatttatgaagcaatggtgcggatggcacaagattttagttatcgttacatgttagtggatggtcatgggaatttcggctctgtcgatggtgatggtgctgccgcaatgcggtacaccgaagctcggatgagcaagatggctgtcgaaatgttacgtgatatcaataagaatacaattgattatgtaccgaattatgatgagtcagaacgcgaacccgctgttttaccagcccgtttcccgaacctactcgtcaacggggcgactgggattgccgttgggatgacaaccaatattccaccgcataatttagccgaagtgattagcgcattacacatcttgatggataatccagatgcgacaaccgctgatttgatggatgccttacctggccctgattttccaactggtgggttagtgatgggtaaatctggtattcgccatgcgtatgaatctggtaaagggacaatcacccttcgcgctaaagtggacgttgaggtccaaaagaacggcaaagaacggattattgtcactgaaattccatacatggttaataaggccaagttggtcgaacggattgctgaattagcccgtgacaaacggcttgaagggattaccgatttaaacgatgaatctgatcgtgatgggatgcgcatcgtaatcgatgtgcgtcgggatatgagtgcttcagttgtcttgaataacctgtacaaattgacaccattacaaacctcattctcatttaatatggtggccatcgtgaatggtgcccctaaagtcttgagtttgaaatcaatcttggaacactacttagtgcaccaaaaagaagtcattcgtcggcggactgaatttgatttgaagaaggccgaagcgcgggcgcacattttagctgggttacgcattgctttagaccatatcgatgcgattattcagatcattcgtggttcgaatacaggtgatgccgctaaggtcttgttgatggatcgttatgatttatcggataaacaagcgcaagccatcttggatatgcgtttagttcgattaaccggtttggaacgtgataaagtcgaaaatgaatacaataatttgatgactttaattgctgatttgaaagatattttagccaaaccagaacgcattaagaagattatctacgatgaattgcttgaactccaaagtaaattcggtgacaaacgccggacagaattattggtgggtgaagtgcttagtcttgaagacgaagacttaatcgaagaagaagacgttgtgattgcattaacgcataacggctacattaaacgattaccagccagcgaattcaaagttcaaaatcgtggtggtcgtgggattcaagggatgggcgtccatgatgacgacttcatcgaacacttgctttcgacttcgactcatgaagtgctcttattcttcaccaatactgggaaagtttaccgtgccaaagggtatgaaattccagaatatgggcggactgctaagggaattccaatcattaacttattaggcattaattctgatgaacgcgttcagaccgtggttaatgttggtaaagaagtgcaagacgaacaatcactcttctttattacccgcttagggacggtcaaacggacatccgtttctgaattcgccaatatccgtagcaatgggttgaaagcattgaccttgcgggaagaggatgaattaagtaacgtcttgatgactgatgggcaacaaaatatctttatcgggacccataatggttatgctgtgtcatttagtgagacagctgtccgttcgatggggagaaccgctgctggtgtgcgtgggattcggttacgtgaaggcgactatgtggttggctctgacttactgattccgggtcaagaaatccttgttatctctgaaaaagggtacggcaaacggacaccggttgcagattacccaatcaagggtcgtggtggtaaagggattaagactgccaacatcactgaaaagaacggcccattagctgggattgctgccgtcactggagaagaggatattctcttaatcactgatactggcgtcttgattcgtttcaaggtcgctaacgtttcacaaactggccgggccacacttggtgtgcgtttaatccgggtggatgacgaagcgaaggtcgcaacaatggcgaaagtcgaagctgaaccagatgaacctgaaacaccagaagcaacgacggcaccaatagcaccaactgatgacactactgatactggcttagcacaagtcgatgaattactcgcgcgggctgaagccgatcaatcggcatcagatgatcaagattcagaaaattaattaaattaaaaaaataaaaatcgtttctgcgtaaatacacttgtaacaactgttaccaagcgtgttagcagcaacaatttttattttagattgtattttaacggccgttatgatagaattttatcttgtgagtatctgtgatttagacacagggtctaaatcgtgaggctaatttttattagtcagttactccttgttcttacacaggtaagaacctaaagtccataaggaggtgaacagtcatggctcaatcaaaatacgaagttacttacatcatctcaacaacacttgatgaagaaagtaaaacagctcttgtcaaccgttacgacggcatcttaaaagacaacggcgctgaagtgattgattcaaaagactggtcaaaacgtcgtttagcttatgaaatcaacaatcaacacgaaggcatttaccatatcgtaaatgttttagctgataatgatgaagctttaaacgaatttgatcgtctagctaagattgatggctcagtattacgccatatgatcgttaaacgcgaagactaattttgaattgtaattattgaatagaggggagctgacagaatgattaatcgagttgtactcgttggtcggctaacacgcgatgttgacttacgttacacttctagtggtgctgctgttgggactttctcaatcgcagtgaaccgtcaattcacgaatgccaatggtgatcgtgaagcagactttatcaactgtgtcatctggcgtaaatcagcggaaaatttcgctaatttcactaagaaaggctcactagtcggagttgatggccgtctacaaacgagaaattatgaaaaccaacaaggtcaacgtgtatacgtaaccgaagtggtcgttgataacttctcattgttagaatcacggacaacaacggagcaacggcaaggggatggcgcaagccaaaactttaacaacaatcaaagcaatggtagccaacaatctggatttaccagccctcaacaatcgggtaatccatcagctgcaaataacactcaagccgatccatttgcaaataatggtcaagcaattgatatttcagatgatgatttacctttctaaaataaactgttttggaaggaggaactttcaatggctcaacaaagaagaggcggcaaccgtcgtcgtcgtaaggttgatttcatcgctgctaaccacatcgaatatatcgactacaaagacactgatttattgaaacgttttatctcagaacgcggtaagattttacctcgtcgggtatctggtacaagtgctaaaaaccaacgtcgtttgacaattgcaatcaaacgcgcacggattatgggcttattaccattcgttacagaagactaatcagtcaaccaaaagacctgctaaacactgtttagcaggtcttttttgtgcgctttaataggggaacatgggattaaattacgggttcaaagcggtaattgtagggcaattgtgctaaaataaaagtagcattttttaagttttagtaaagaaccacatagactcaatgatagatgaacaagaatcagaatgggatctagaattaaggagtttacatgaaaaataagtttaaacaattaaaattaccacagtttttagatgatactcgcctgcggaccgttgccctgattttgttgggccttacagcggttagtttggtatttgctgcgatgttagattggctaattgctctaattttattcgtgctgctaatcgggacggtcattactgtgctatacgcgatcgaaacggtcactgagaatacagctaagtatgtctcggacttgtcgtaccgcattaagcgcggcgagcaagaggctttaattaagatgccaattgggattttattgtacaacgaatcaggtgaaattcaatggacgaatccttatttacagcaatatttcggtaataaagaagttttaggcaaaaagattaagtctgtcgatccagagttggcagaattagtcgcacaaaatgaagatgctaatgaaacaaaaattgttcgttggggcgataatcaattccaaatcattatccaagaaagcattggggtggtttatcttctcgatattacacgctatgcggccattgaagatcgttatgaagatgagcaagtagccatcgggcaagtgttcttagataattatgatgaaatcactcagacaatggatgatcaatctgtttctaatctgaataactatgtcaccaacgagttatcacgctgggcgaatcagtttcagatgttcttgaagcgagttgatgatgatcatttctttgttttggcgtacgccaaatcattacacgccgctgaacaagagaagtttaagattttagatgaaattcgagaagaaacatccaaacaaaacttcccactaacgttgagtgttgggtttgcttatggggaatccgatttagccgttctagcaacaacttcacagagcaatttggatcttgccctcggtcgtggtggtgaccaagtcgttgtcaaagcgagtgaaggacaagcacgtttttatggtggtaagactaatccgatggaaaaacggacgcgggttcgtgcacggatgatttcacaagccttacaagaaatcttcaaacaagttgacgaagtctttgttatgggccatattcggccagatatggatgcattgggcgcctcatttgggattcgccggattgccgagatgaacggtaagaagtgctacgtggtcgttgaccaaaacaatattcatacagatattcaacgtcttttagaggaagttaaagcctaccctgaaattgcagtggaagtgttgtcgcctgaagaagcgctcgaaaaagcaacggccaatagtttattagtgatggtcgatcattctaaaccatccataacaatggcgcctaagttgtacgagaagcttgctcagcggacgattgtcatcgatcaccatcgtcgtggggaagagttcccagaaaacccaatgttggtttatatcgaaccctacgcctcttcaacgtgtgagttagtgacggaaatgtttgaatatcaaccacaaaatatcgctaatattaacaagttcgaagccacaacgatgttggctgggattacggttgatacgcagtcattttcaatgcgaactgggacgcgaacgtttgacgcagctagttatttacgttcagttggggctgatgcttcgatggttcaacacttgttaaaagaaaatgtcgataattatattcaaaagaatcatttaattgaaaccattgaaatggttgagccaaatatggcattatgtatgggtgaggacaaccgtacctacgatccggtcatcgcagcacaagcagcggataccttgctgtcattgtcagacattgaagcctcgtttgtcattgtgaaacgcccagatggcatgattgccatttcagcgcggagtctaggtgatgtgaatgtgcaagtgattatggagaaattaggtggcggtggtcatctttccaatgcggcaacgcagatggcagatacgactgtttccgaagccaaggcgaagttattaacggttttggcagagctatttgatccggaaacggacaaggaagcaacaaacgattaattagataaggtggtcagaacaatgaaagttattttcttagaagatgtacgcggtaaaggtaaaaaaggccaagtgaaagatgtgccagatggttacgcacaaaactttttaattaaaaatgggaaagcaaaacccgcaacatcagctgctatcagtgctttaaaaggccaacaacatgctgaagctaaaaatgcagctgctgaattagcggaagcaaaggttttaaaagccaaaattgaagacgataaaacaatcgttgaaatcaaatctaaagcgggcgaagacagccgcttatttggttcaattccaagcaagcaaattgcccaagcattggctcaacaatatcagatcaatgttgataaacggaaaattgatttaccagaaccaatcaaagcgttgggttaccggaatgttgatgtacggattcaccctgatgtaacagctacgattcgtgtgcatatcgtaaccgaataataaaatgaatgattgaaaagaccgtgattagcaccactatcacggctttttttattgctgaccaatcggtgactgttgccagtcactggtattttgagtaaactagtgagtaattgaagtcgattaaccaaaggagtaaaaatggtgaataatgaactaattgaacaagtaccgccgcagaataatgaggcggaacaggccgttttaggggccgtctttattagtggcgatgcgctcgttgaagcaatggaatacgttactgccgacgatttttatcgtaaagcccaccgtttgatcttcgagacgatggttgaattaaacgaacggggtgaaggaatcgatgcggtgactttaaagagtgccctcgatgcgcagaaccaattggaagatatcggtggtattggttatttagctgagttggctgaggctgtaccaacggcagccaacgtagtttattatgccaagattgtctctgaaaaagcaatgctgcgccgtttaatccaaaccgctcaaaatattgtggcaaagggttacgcgcaagatgaagacgtcacggatattttagataccgctgaaaaggaaatcatggatgtttccgaacggcaaaataaggccgggttcaaatcaatttcagatgtcttaacgagttcaattgaacaaattgataagttatatcaaaatgaagaagacattacgggtctatcaacgggataccgcgatttagataagattactgcgggtttgcatgaagatgaactcattattttagcggcccggcccggggtggggaaaaccgcgtttgtcttaaacattgctcagaatatcgggacgaaaaccaatgagaatattgcaatttttagtttggaaatgggtgctgaacaactcgttaaccggatgttgtgtgcagaaggaagtattgacgccaaccatctaagaaccgggcaactcgacgaacttgaatggcagaatctaatcgtagccatggggagcctttcaaaagcgaatatctatattgatgatacgcccggcgtgaaaatggcggaaattcgggcgaaatgtcggcgcttagcgaaggaaaaagggggcgttggcttaatcgtcattgattacttgcaactaattgaaggttccggccaagaaaaccggcaacaagaagtctcggcgatttcacgtcaattaaagaaattggctaaagaattacgggtaccggtcattgcgctctctcaactctctcgtggggttgaacaacgacaagataaacgcccagtcctttcagatattcgtgaatcaggatcaatcgaacaagatgctgatatcgttgctttcttatatcgtgatgattactatcgcgatgaacctagggaagatggcgatgatttcggtggtggcaatccgccagcaccagcgccacagcagtcagatgatgcggacgttggagaagttgaagtgattatcgaaaaaaaccgtgcgggtgcacgagggacagtcaaattattatttgtcaaaacgtttaataagttctcatcaatttcgtatgcggaccaatagtaatgactatttttaataaatagtgaatattatcgtaaatgaaatacttaaaaaaaccatcataattaaagtaaaaactttaattatgaggtagattgtaaaattaatccgaacgctgttcggacaaaaaagatcagcttcctttaaaatggtgtttaccacaaacccatcttttaggagctgatcttttgtctagtataacctattccgaacgaattaaaatcgaaaccttttgtgaactagggctgtccaatatccaaatgggcgttcggctgaaccgatcaccgtcaacaatttcttatgaattatctcgatgtcaaccttatcaggctgaattagcacaaacagatgccgaatacaagcgatcacgatgtggtcggaaaactaagctgagcgatgagttaaagcaaaaaattctcaaccatttacgtctaagctggtcaccaggaatgattgctcacgaatttaaactagctactaaatctatttataattggctaaatcaggggagaattggtttctccttgaatgatctacctgaacatggcgtacgccaacggcgtaacgttgaccaacgatccaaatataatcaatctttggggcgatcaattgaacagcgtcccatgatgattaatcaacgtaagcgcatcggcgattttgaactagatacagtcgttggtcctcgtgggcatagtaaggcagttttattaactttaatcgatcgcaaatcacggttcctttgggcataccggttaaaagatcggacgacagcgactgttaatgaagcactaactaagttcctaaccacttttaatggtccggtgcacagctttactgtggaccgtggcactgagtttagtgggctagtatcacttgaatcacaatatggtattaagacctattactgccatgcttatacgccagctgaacgtggtagtaatgaacgctttaatcggaatttacgttatttttatcctaaaaggactcgttttgagcacattagtgctcaagatttaacgacgacgttactccaaattaaccagcgaccgcttaaaatactcgactggcaaacaccgtatcaggttatgctgacaaatttgtccgaaaattcggattaaatttgcaatctaccatagacaaaaaaagtgcccacaaacggttaaatttgtaggcactttttttgatttatttttgttcagcatgttttgctgcaattaatgaacgatagttgaatagtaagtttaagatgacagcgctgagactgccgactactaagccgttgcctagaattgtgcgaacactcgttggtagtgattggagcaaggttggatgaattgctacccctaagcctaagccgattgaaacggcagcgactagtaagttgcggttatcatcaagatcgactttgtgtaacatcttaatgccttgaatcccaacagtgccgaacataacgaccatcgcgccccctaaaacagcgcttggaataatggttgcaacggccccaatcttaggtaataatcctaagatgattaagaagaatgctgagtagtaaactggttttttcgttttgataccggataattgaacaatcccaacattttgtgagaacgttgagtaagggaaggtgttgaacaatccccctaagatagcggcaatcccttcagcgcggaagccccgcttaagatcattgctagtaatgtcgcgcccaacgatttcaccaagggcgaagaagacaccgattgattcaatcatggtcgttaacgcagccaatgacattgaaacgattgatgaccattcaaaacgaggtgttccgaagtagaataattcaggtaatttgaaccaacttgcttgacctactggatctaaggacacaatcccaatcgcagctgcgattaaggtcccagcaataatcccaattaaaatggcgatttgttggatgaagccacgcccccagatactaaaaatcaggattagggcaatcgttgaaaaaccggtaattaagtttggtgtactcccaaacgacttagcagcaacatcgccaccgcctaagttttggaaagcaacgggaatcaatgtgaatccgattaatgtaatgagagaccctgtgacaactggtgggaagagccaacgcaaacgtgcaaacaagccagaaactaacaagatgaaaattccggcgccaataatactaccgtacataacgtcaattccgagttggctgttagtgccgatggcggctaacgggccaacgtactcaacagcacaacctaggacaaccggtaatgcaatcccggtcagtggggttcgttttaattgtaatagggtcgcaaccccgcacatgaaaatatcgactgaaacgaggtaagtcatttgagcggcattaaaatgtaatgcagccccgacaagtaatggaattaaaacatcgccagaatacattgctagaagatgttgtaagccgagaatcgctgctttaatgtggggaagcttttcatttggattaattggctgtgctgaatttgagtgtatatctgccacgagtgtccctccaagataattgttaaaatttagttaacatttagtttagcacacgccaatagtgacttcaattagaaattaagtaaaaaacgaatataacattcttaaataatcgcgatagttcgcctttgtgatgatgcacaccaactgttcgatgacaaaagtgctttcttactgaatgattcgcttgaaaaaggcgataattgttcttaaattaccgattattatgtttcacatgaaacgataatctgaaaactgggaagaatcttgtttttttagggtaagtacgttaaactaaaaggtatatgtgaaacaataatgttccacgaattaaacgcctactttaaagcatagttaaggagaaataatgacaccatcgggttttgcagcaacgttaaaaacatacaatattcaagtttcacaagcacaaatggatcagtttgaattgtatttcaaacggcttgtacaagtgaaccaacaagttaatttgacagccattacagaacaagaagcagtttatctcaagcacttcttcgattctgtcacaccaactttgtatcttgaaaaactacgcactgaaccccttacgatctgcgatattggtgcgggtgcgggttttccatcgttaccaatcaaaattttattcccgcaattgaagattacgattgttgattcattaaacaagcggattcacttcttagaagaattggtccgtgaattaggcttgtctgatgtgacgttggtccatgatcgagcagaactgttcagcaacccgaagagtccatatcgtgaacagtttgatattgtgactgcccgggccgttgcttcattaaatgtactggtagaattctgtttaccaactgttaaagttggtgggcagtttatcgcattaaaagcgagtcaaggtgaaacggaattggcagaagccaactatgcaatcgaaacacttggtggccaatttgcacaagacattgctttgacgctaccagaaacagatgatcaacgacatctaatcgtaattgataaggttgtaccgacacctgccaagtatccacggcgggctggtgtgccagttaaaaaaccgttaatggctaaggaggaaaaataatggcactctcattttttaataagaaaaaagacgataaaagtattaatcaagtgatcaaagtgccggtttcagcaattgtgcctaaccggttccaaccacgaaaagtatttaatgcggacaatatcgccgaattagcaagcacaatcgaacaacacggcttattgcaaccgattatcttacgtgaatatgaagatcaaaaatatgaaattattgcgggtgaacgccgttttagagcgattcaaaccctcaaatgggctgaattaccagcgattgttcaaactatggatgatcacgaaacagcttcaatggccttgattgaaaacttacaacgcgaagaattaaccgccgttgaagaagcacaagcttataaggacttaatgaagctgaacgactttacacaagccagcttggcagaaaagatgggtaagagccaatcttttgttgctaataagttgcggctattgaaactctcacaacccgttcaagaagccatcatgaatcatgaaatttctgaacgacacggtcggagccttttacggttggatgaattcaagcaacaaatgattttacaccaaatcttggctgaacaattaacggttaaggatacggaagcgctggttaacaagacgttgaatcctgaaccagaatcaactgaagagacagttgatgcaaccgatgacagtttaaaagaagctaccacgaaggctaaaaaagcgaacgataaagcaaaaaaagcaattgcccatgatacacgcattgccgtcaacaccatcaaaaagtcggttcaaatggttgaacagagcgggattgccgtcaaagccaccgaagaagaacaagatgatgtttatcggattacgatcgaaattccaaagcaataagggaggctcattatggcacacgttatttcaattgcaaatcaaaaaggtggcgttggtaaaacaacgaccacgattaatctaggcgcttgtttggcggatgctggcaatcacgtgttaatcattgattcagatgcacaagggaatgcgacaagcgggattggggttcaaaaatcccaagtcgaaaaagatatctatgatgtgttggtcgatgaattcccactaaaagaaacaattattaaaacatcacataagaacttagacattgttccagctacgattcaacttgcaggggcagagatcgagctaacatcacagatggcgcgtgaaatgcgcttgaagttagggttagaaccagtcttagccgattatgattacgttttgattgactgtccaccttcattagggcaactttcaatcaatgcctttacggcaagtaattcaatcatgattccagttcaaagtgaatattatgccttagaaggattgagccaattgttaaacaccgttcgtttggtgcaaaaacattttaacccaaacttagcgattgaaggcgtgttgttgacgatgtatgatgcgcggacgaatttaggggctcaagtgattgaagaagtgcgtaagtattttggtgatcgggtttacgacacgattgtgccacggaatacgcgcttagcagaagcacctagtcatggcgtatcaatcattgattatgatccaaaatcacggggcgctgaagtttaccaaaatttggcaaaggaagtgttagcagctcatggcaactagaaatggaaaaggattgggccgcggtttggatgctgtattttcagcgttcgaaggccctaataaaaaccgggcggatgaattagttgaagagattgcacttgatgatattcgtccaaatccctatcaaccgcggaagacatttgatgaagcggctttggctgaattagcagcgtcaattaagaagtcgggcgttttccaaccaatcattgttcgcaaaagtattaatggttacgaattaattgcgggtgaacgccgattccgtgcgtctaagttagctggtaaaacagcgataccagccatcacgcggcagtttgatgaatccgcaatgatggaaattgcggtcttggaaaacctgcaacgtgaagatttaacgccgttagaagaagcccaagcttacgatacactcttgaaaaagttaaacctgactcaagctgaagtatcagaacggttgggcaagagccgcccatacattgccaattacttgcgcttattgggtttacccaatgacgtgaagacgttattacaaaatggtgacctttcaatgggacaggcgcggacgttattatcattgaagaaaaaaagtcagattagtgcattagcgaaacgcacgattgatgaaggcttaacggtgcgacaactagagcagttaattaaccagatgaaccagattaaagctgcgaaagtgacgaagaccaagattaaatcaccctatattcaagcgagtgaaaatcaattggtcgataaatttgacaccaaggtcaatattgcgattaacagcaagggtcgcggaaagattgagattgattacagcacagtcgatgatttaaaccggattcttgcattgctagatgtgaatatcgattaaagtgaggagtcgagctagatgtatacattaggcgatcttgttcagatgaaaaaacaacatgcctgtggcaccaatcgctttgaagtggtgcgcttggggatggatattcgaattaagtgcatggggtgcggccacgccgtcttattaccgcgccgtgaattcgaaaaaaaacttaagaagaatttggtgcctgcagcacaagtcgttgttgcagatgaaccccactatcaagagatgcaacaaggtcccaaccaaactaatttttaaagtaaaggaaagtgtaaaaaactatgtcattaaccgcaggaattgtaggattacccaacgtcggaaaatcaacgttatttaacgccatcacgaaagcaggcgccgaaatggcgaactacccatttgccacaatcgaccctaacgtcggcatggttgaagtccctgacaagcgtttagaccggattcaagaaattatcccggctaaaaagatcgtgccaacgacttttgaatttacggatattgctgggatcgttaaaggggctagcaaaggtgaagggcttgggaacaagttcttggagaatattcgtcaagtcgatgcgattgtgcatgttgtgcgcgcctttgacgacgataatattacctctgttaccggaactgttgacccgttagacgacatcgatacaattaaccttgaattgagcttagctgatttagaaagtgttacgaagcgttatgcgcgtgttgaaaagattgcgcggacgaaagacaaagacgccttagccgaattcgaagtgcttaaaaagattaagcctgttcttgaagaaggcggctcagtacgttcaatcgaatttaatgaagatgaagcgaagttagttaaaggcttcttcttattaacatcaaaaccggttttatatgttgcaaatattgctgaagatgccatggctgatcctgatagtgtggattatgttaaacaaattcaagcgtccgcagctaaagaaggcgccgaagtaattgccatctcagcaagaactgaagaagaaatcgcctcattagatgatgccgataaggctgaatttttggaagccgaaggggtgactgaatcagggttggataaattgattcgtgcttcatatcatctactaggcttagcaacattctttaccgctggtggaaaagaaacccgggcatggactttccgtcaaggcatgaaggccccacaaaccgccggtgtcattcattccgactttgaacgcggatttatccgggcagaaacagtttcttttgctgatttagatcaatacggttcaatgcaagctgttaaagaagctggccgtttacgtttagaaggtaaagaatacatggtcgaagatggcgacatcatcgaatttagatttaacgtttaatgataattgaggaggaagacaattggctaagaacgaacaaccagtagtaaccccagaaccagttgatattgaagggttagaagcaaaactcagtaagaaaaatgcggactatttatttaagttcaaacgcgcattaaatgccgaacaagtgccagcagaacgccaaactgaaatcttggcagaaatgttaccagaaatggtagcagaacaacataagggcaagcctgcaacacaagtatatggtccagtgacaaacaagattgatcaattgttgcacgcgccaaaacgtcctaagcaaacatcacttcaactccaaatgcttgataacggcttaatctttttaattatgtacctagcctttaacggaattgcggcttatttctcaacgaaggggtcagcaaccagcattgggattacatcaattgtcattacggctgcgcttgcagggatcatcatgacttatccaatgcgctatacgcaaatgccaaaagaacaacggccaccattttggaagatggcattggttgtaatcggcttaacactagcctttgttgcggcatacggtgtgacaatcttggttccaagtttcttgaatccagtcttgccaccacttgttcaaatcgtaattgcagcactcttaatcggcgtgcggatttatatcaaacgccgttttaagattacaggttcattcttcggttaatattacccgggaaataaatggcaattgaggaggatttgagatgattagcactgaagaacggcaaattggggcagtcagtacgttgattgtggccccaagtggtcaagaaaaagcagtattaccaactgtctttgtatatcatggttggacgcaccgtaaagagtcagaattaatggtcgcccactttttagccaaggctggttttcgcgtggtcttaccagatgcgaagtatcatggtaaacgacatggtagtcagctcttttctgagttaatgtttgaattttgggacattgtgatacagtcggtcacagagtttggtgaactggttgcaacactgagcgctgaaggcttagttgatcctgaacggattggtgttacagggacttcgatgggtggcattacaaccgatgcgattctcacccgatatccgaatgtcaaaattggcgttgataagattggcgcaccaatgcctgtcgcacttgctaaatggcaggttagtcaattaccaacggccttgcaaaccaagtatcaagatgcgattgaagataccctagcacggttagcggcgtatgacttatcaatgcacgttgatcacttggcaggacgtccattgcatttctatcatggaactgctgatacgatggtgccatatcaattcacggcagattttatgaccgaaattcaggcgcaaccaagttcagccactgcattagtgacattgacgacggaagaaaatgggcaacataaagtatcagacgatgcccaactcaaaaccgttgaactgatgcaacagtacctactttaaaaatgagaaaagccgccagaacgtaaattgttctggcggcttttttgatggggacacaaaaaaaccagccttggggagactggtttctagcagatccgaagatctaaaaaggagtagggggtacacgtattactttgggggaataatacgtgcgtggtagattgcgtctaccttaattttactttggaggagtaaaatgaaaaagttaagtagtatgaaatagaaaagattcgcttttctatactcaatactataatgggaatttgtgaagattttgtgaccagaggtttatagatttatgaaaaaagcaataaggaaagtttaaggttcaaagagtatgctaaaatgaaggtactttataagagatcgagagatgattgatatgacaaaggggaccgttttatttgatttggatggaacgatagccgattcgcaagaaggcatcgtgaacgccttggaatatatgattgaggagttatcattgccgacgcaaaccaaagctgaactggtcacattcattgggccacccctcaatgaaacaattatgcgtgagtttggtttaaatgcagctgctactcaagaagctattaaagtctttcaagcctattatgcgcctaaagggttgtatgaaaatcaactttatcctggcatgcgagaaaccctagcggcattgcaagcacaggatttacaactggcaattgcgacttcgaaaccagaaccattcgctaagaaggtcattgatcatttagagttaggcgattactttagcggtgtttttggagcaagtgttgatgagacaactcgggtcaaaaaagcggatgtcattacttacgcattatcagaacttggtctatcgccacaaactgcaccattattgatggtgggtgatcgccaaaatgatatcttgggcgctaagcaaaacgcgatgaatgcagttggtgttagttatgggtttggcacaatcgcggaactcaaaaaggcgggtgctgtccaaattgtccaacaacccagcgagttaatcacatcattaccggctaatcttaaattttaggcatgctgttgcgcgttagcgaccattaaggtataaatccgcgcgacatctttcgcattgccacggagctcataatcggcgataaacggtgcatcgaattggaccgcataccgtttagcagttaagcaatattgttcgttgaagttgcggttcccgctaccgattacgccataacaaaggcgtgcgttctgcgcataatcgatgtattcgcctaagctattggtcattaattctttaacgccattatcaatgccgttgccaccatctaagtaagttggaacgaacgcgtaaaacggttcggtctccgctttaaagggggtcgcatccgaaatttctgtgagggtaatggttggtaacgctgggttattagcatgttgttgcgccgcataatcctgtaaatccgttacaaatgaacgtgtattaccagcaattgaaatatagagaatcgttaaattttttaacattgaatggcctcctgtgactgataagttcactttagcatttaatgattaagaatcctagtcttgaagtttaatagggttcgtgaatagaaagggtgtttaatcaatggaaccaattagtcgtttgaatcaaaatcaaccaagcgtgcgaccacatcgaggtttaagtcgctttttgacgttcttaatctttctttgcgttttccttggcattggtggcatgattctcagcctgacagttttgagagaatcatttacgcaagaacagctcagtgaaccgaagacgttagctgcgatgactgataaaattaacgttgttttattagatgcggcacaaaaaaatgggctaccaactgaagtacaagtcaaattactgacccaatctgatgtgcgggccgatttaaagaaaactgttcataatatttatataggacaagaaaagccgttacccacagcacaaatgatgggacaacttgcagcccatttagaagcagttgtgcctgaaaatgcgttgacggaatctttaattaaaacggcagtggttgcggttcaaccaccactacaagaatacctcacgaaccaaattgaagcaccttacttagcaccactagcgactaagatgttgtttgttagaaatgtgatcaatatcttaacctgggttgcaattattatgggaattgttcttgtactagttcaatggggactaagtggtcaattccggtatgtattagggagtgttggtgcaagttttgcttggagtggcttattcttggcactaggggcggctgcgtttaaatatagtggcattgttgaacaaattgctcaaaaagcgggcgattttaatcaaacaattaccgactatgggttggctgttctggattatggtttgaagacaagcacgattgttttaattggcggggcgattgtctggttggttgcaacgcttctccaaagagtacgatattaaaaaagatgacctttgcgggtcatcttttttaatagggcgtaatcacgatttcatggttcaagtagttagccatgtagatttgttgaagactgtagccttgctgttgaatgtcggcgaggagccattcttcagtttgatcgattaattcaagtgcttctgaattaatctggccgtccataatcagcggatatttaatcgtggcgtcgcctttttgcgtaatggttaattgtccgttttgttccaagattgcgcgactgaccgtgcgaatatcgctaatcccggcaattcggagtttaaacgacagatcctgtgcggataaactattcttagaggccgtttgaatatcaatgtggccgttggtgataattgtttgtggattaccaattacccagcgtttaatccagcgattgtgagtggttagaaacttcattgtgaagacgattaaggtccagatgagtaaaacgagtaagaattgtaagagcgagatatcggcattataaatcataccgccaacaatccccccaagaacgtaattttggagttgatcaatcccactgctaggggctaaattccccttgccagagaggttgatttgtaacactaaacagaagaaaccgaaaattaatttaatggtaatatcgaaataagatggcatagtaaactccttaatcttgataggtgatgtcttggctaatcaactgagctttttggagttgataactagtaaaattgttatcaaatatgacttggtagttttgatgaccgacgcgcactaccatgttttgctgaagcgaagtcgtgttgactgcgacggttttaaggctagctttctgcgcagtcgccacacttctaatgaattgcgccatctgagcttgttgcgagtgggcggtgttaagctgttgaatccgtgtatattgaatgccggcgagtaaaatcccaactaagccgaagatgattagtaagtcacggtacttcgaatctgaacggtggcggagatattgaacgaagaagatgatgattaaactggcgatgatcactgacagacttagtttgagatagaattcgaaatcattctgattgctaaagtatgaataccgataaaaaagcataatgacctccttaaataaacggttaagcctattgtagcacaccggctgagcagatagattgtgtcaaatttaaaacggcggtagactggaagcatgaaagggatgattgatatggcattaaaaataacacctgcagcagttgcgaaaatcaaggataagatgacaccgggtcaaaaaattttattggacttagatgacggtgttggtccattttcaaacgttggttattgctcgttggatacgaactttagattgctattagtaccagcggatgctgacattaaagattatccagatgaatttgaatcaaatctaggggctgtttactacaaagattatgcagctggctactttgatgaacatgaagtattagacgttaacgaaaagaatcaaatgttaaccttgagtaataacagtggcttaattgatgggcacatctccattgtcgtatttgagaatgaatcaatgactcattaataactgtggcgtcgggcagaaagtggtccggcgttttttgttgttcatttgtactttatccacattggtgggataatgacaaaaacagttttattgaggagcctgacatgaaaacagcaattgtgactgatagtgcggcgtatttagatccacaagttgccgccgaccataatattactgtggtaccaatcaccgttatttttggacaacaaacttatttggaaaatatcgatatcacgagtgaagtattttacgataaaatgcgcactactgaaaaattaccaacgacttcgcaaattacaatgggtcagatgcaacaggtttttgatcaattgataaaagcgggctacgatgaagtgatttgtatccatctttcaagtggcattacgagctttgtcaataacctaaccgcctacgcacagtcggttgaaggcatcgaagtgtatccttttgattccaagattacgagtgccggtgaagggttcttggccttggaagcggcgcggttagttgcccaaggtgaacatgccgcaactatcatgccgaaattggtagctttacgagcaacgatgggcgtttatttcgttgtggatgatttaagccacctcttgcgaacgggccggatttcgaatagtgcggcctttgtcgggaatcttttgcggattaaaccgattttaagttttaacgatgccggccaaattgttgccttaacgaaggaacggaccaagaaacgggcctttcaaaaagtattagcggatttcaaagcagcagtcgaatctgttgactatcccgtacgagttagcgtgattgacggtaataatccagaagaaagtgtgcagtgggtcgcaacgttgacggaaacattcccagggatgccgattgaaacgagtcacattggtcctgtggtcggcgtgcacaccggcgaaaaagtaatggggctcatctggagtcgtgattatttagcataacgaaattaaaaaacagccttgcgcatttgcgcaaggctgtttttgtttaaatgtgtgctattagccatctccttgtggttaatcctcaggagatggctgatagcacactctttttttaattggtttcaataattgtattgttggctgtattattttgtggttcgctggagacttcaaaccagtcgatgtaaccgcgattgaattcgaccacttttaatgtgaattgattgatatgaatgaccgcactttgttgtaagtcggtgaagttttctaagacataaccggccagggtcacgctatctgaggcttcgaaggcatcaattttagtcttgaagaaacgttcgaaatcatagagcgtcgttttcccactgacacggtaacggttatcgtcttctttgatgatatattcatctgaaacatcgtcaatttcgtccttgacggtcccgaatagttcttcatagatatctttatcagtgacaatcccactcgtcccaccgtactcgtcaacgacgaccacaattggggtttgcttattgatcatttgattcaacaaactgtgaataggggttgcttctggaacggagataatcgaacgcagtaatttgctgacgcggattgaatcgtcgacttgtgcctgacggactaaatcatatgcgtagacgtaaccaagaatcttgtctttatcattttcagcaaccactgggaagcggctaaagccttgttgtaagtagtcttttaagacgtctttaacggtatcggtgatatcgacgacgtagagacttgtgcgatcaaccatcacatctttggcaatccggtcattaaagtcaaaggcccgttgcatgtaaactaaatcgttgcgatctaattcaccaccagtgacggcatttttagagaggctaatgatttccgcttgggaaagcacatcactaccttcttcagcaggtgaaaagccgattaatttcacaacacccgttgcggaaatgttgagtaaccaaacaaatggatagaagataatatgacagtaatggaggggcttagcaacagccatcaacatctgcattggaatatcaatactaatattcttcggcacgatttccgtgaaaaccacttctaaataggttaagactaacacgccggcaactgcgccgatgatgtgtaagccaccatttgaaatcaggtgagtgagaccgagcagatcgactagaatggtttcgacggttgattcaccaatccaccctaaaataatcccggcaacactgacccccacttgggtggttgagagatattcgtttaagttttgcgtcattttaagcgcaagattcaattttttaggattaccatttcctgaatggatggcatcttctaaggcacttggccgtgtttggacgagcgcaaattcagcggccacgaagaaggcggctaaaaagaaggtgaccaacataacaaatagattagtgaataactcaccacttgacaaaataattccccatttcttaactaactagttctattttaccattctcaagcttaaaacggtaaataacgtcgggctttagtccgattttatcggattcaataataatgaaaataccataatttagggaagaggtaaactaaattgttaaatatctaaactaaaatacgctttgtcacattttgacgttgatctgtatcgaaaaaagccactgtgttagtggcttttaaacagttttagaatgttgcagtatcaggatcttgcgcgtgtccaacgacgccgtcaagtgcatcaattgcagccatgtcttcatcggctaattcgaagtcgaaaacttgggcattttgttggatgtattcagcatgcacagacttaggtaatggtaagaagccgtgttgtaatgaccaccgtagtgcaatttgtggaattgagcgttggtatttgtccgctaattcttgcatttctggcacactgaaaatcttcccagtcccaagtgggctataagcttctaataacatgccatgttcacgtgagtattgggcagtttcaggttctaattcgccaggggctaagaagagttggttgaccattggttgtaccgttgcagtctttttgagcgcttctaaatggcgaacacggaagttgctgaccccgatggcccggactttaccagctttgtagagcatctccattgcacgccatgtttcggcgttggctgtttcccaatcatcacggtaggcaattgggttgggccagtggattaagagcaaatcaacgtagtcggtttgtaatttcttgagtgattcttcaaaagagctgattgttaaatcataagtgtgattactattccagattttggtggttaggaataaatcggaacgatcaacgccactagcttggatggcctcaccaacactcccttcattaccgtaagcttgggcggtatcaatgtggcgataacctgccttgagcgcctcttcaacagcagctacggctgtttgaccgtctggtgtttgccaagtcccgaagccaattttaggaatttgcacaccgtttgtgagcgtgtatgaactcgttaagttagacatattaaaacactcctttatcagtttaaaatctctacttacagtttacttgttttcgatagagatagacagaaaaccgacttattccccgggaaataaaatcgatttgtcataagctgagcaatttggcctgaagtgcgggatcaacagcatagaggtaaaggccgtttctagcgcggctcattagaacgtagaggctattaagaataatttgctgtttcgcggcttcaggatcagccagctgtgctgcgccggcaaatgcggcttggtcctcgtaatattcaggatgaataactagccgctcactttgtggatcatacgtgacggatggcccgatgatgacgccggcatagttgagatcaaagccttgaatggtgtacacggatccgacttcatctatactatcttcacgttctgcccaataggttttagcggttggctgataccgatcccagcgtaatttgaatgtcgatgtctcaacgaagtgatcgtgaccatcattgagtgttgctggaaaatcgtaagtagctagcatgcgtgcaagcccactcgtttggtttttaaagcgaatcgtttgatagagctcattggcatcggtgaatattttgaattcaaagtgtggatcatgtggcagggcagcgacttgttgttgatgaaaggtttgcacccaattttcaacacttggatgggcttgcatccgaaattgatgggttagttgcgcggtctgatggggagcagcttcaattcgttggcggagttgttgctgttgccagaagctcttcactttaagcacttgctgttcatcaaaaatcagaatggtgatccgactgtgtcggcgaatttcatcgagttgatttgtttgattgaagtggctataggggtcggatttggttaacagtaggtgtgcctcatcaacgaggacgatatcggcaagttggtggtttttagccgcttgattgatgaatgtcgttgggcgttgaaaatcttttttcaataaaacgggtgccgttgttgtgccacttttgtagagttttagcatttctggatgattgaccaatagaacgttttgactgccatagagtggcgaggtgggtgtttggcgcgcaagtgtctgcagtaccttgaagacactgctgaaaatcacgctcttaccagtcccggccgcaccttgaatcaagaaggtggcgtgttcggcgtgcgcgtttgccaaacaaaattgaatgacttgttcttgtagtgcttgttgttccgttgttagttggttggcgggacgattgagtttataaagcgcgctattttgacgctgtgcatttggcaaagtgaggactcctgttcattcatttcaataaaaaaagccccagtagatgtagaaataacatcgcctggggcagtcgtgctaatcgacaaaaattagttggaattcatgttgcactaaatcgagattgacggagacgtggcggttgagatcggccacaattttacgcgctaatgttacccgttcttcgaagcttgtggcaagtgccgcgaattcagtttgtttaaagttgtagttttcagtgataaaaatcgcgtctgtgacatataacaggttattttcatcgtgacgagaaccgctctttaaaacggcatcgatataatggtaaagctgagtaggggcaaagttcaatggttggtctaaaacggttgtaatctgaaaatcaggtaaatcgtcaaccatttgtgtgtttagtgtgacttgggttaatgcttgatacagtttcatagtgacaccttcctaatgttgagatttaaggtcgtgcttgtggagcttctaagtggcgttgaataaagcctaacgtcacatcagcgataatggccatcagggcggttggcagggcaccagctaagattaaggcgccgccattagtggcgttggtcccgcgaataatgatgtcgcctaaaccgccggcaccaacaaacgcgccaatcgctgtaatcccgatggcgaccactaaggcattgcgaatccccgccataatgacggccaatgataagggaagttcaaccatccgtaacagttgccaatttgtcatgcccatcccgattccggaatcgataatattatcggaaacattctccataccggtgtaagtatttttgataatcgggagcaaggagtataaaaagacagtcgcaatgacggttcgtgtgccaagccccaagccaagcataatgattgagagcattgcgagtgaaggcactgtttggatgacattcgctaccccaattataacattactgagctttttccggtgcgcaataaaaatccccaagggaatgccaatcaacgcggcaagtaaaacgccataaatcgaaatcaaaaaatgatgactaaactgccgtaaaacataactgccattatgctggaaataatagacaagttgttgccaagtatttaaattagtcatttagcggctcctttccggaaataattatgttcctgaagaaattgttttgcgactactgcgggttctagtagatcattatcaactttaaagttgagggtttgcatggtgtcgaggtcgattttgccatctagacggtgtaaaaggggcgctagtgctggctgttctttgagaatctgatcagtggcgaccacgctcgcatcgtatggtgggaagaagcggcgatcgtcttttaagacttttaagtcataacttttaatccgtccatcggttgagtaacctaaaacgacgtccattttaccagccgccagtgcgctgtaaaccagtccgatttgcatgggcgcaactttcttgaaatcatagccatacgtttctttaaatgcgggatagccatcgccttcgtgatttacccagacggaatcgacaccagctgttagttgatccgccacttttccgagatcactgacggtttctaaatgatatttcttggcggtttcctgggtgaccataaaggcataggtgtccgcaaacccgtaggaagggaaccatgtttggttgtaacgatctttgaaagcttttttaacgattttttgggctttttcaggatctttagtaggtttcatttttaaagtaccagtaagttcagttccagcgtagcgactagcagctatgtcggcgtcaccacgaattagtgattcatgcgttaccgttgaagaacccagattattaattaaagtgaccttattttgtgtttcgtgggtaatcaactcgctcagaatattggcgagaatttgtgactcagtggtgcttgaagagctaatgcgaattgtttgtgattgacggtttccgatgccaagtgactgacagccacttaacaggaggagactgccaactaataatccgcaactcgtaatgaatcggcgtattttatgcataggagcctccttatctgattgcagcgggggtcagttgtttttccaaccggcccaagccaaaatcgactagcaatgctaacaatgtgacgggaattgtcccgccgatgattaaatccggtttgaaaagattcaacccgttgaaaatcaagtcgccaagaccaccagcgccaatatatgaagcaagggttgcccaagcaatcacgtaaaccgcagataggcgaattcctgccataatcacgggggtcgccattgggatttccacttgcataattgattgaaccggcgtcatgcccattcctttagcactatcttttagaatcggatcgacatcgttcatgccgatgtaggtgttccgcaaaatagggagtagtgagtagataaataaggcgatgattgctggtactttgccaatcccaaagagcggaatcattaaagccaatagtgccaatgaggggacggtctggagcatgctggcaatggcaatcactactttggcagttttaggaaatcgggtgagggcaattccaaggggcaccgcaaccattatgcccagaactaaagcgattgcggaaatgtagagttgttcccaagttttaatcagtaaatcagagccatgttctgttaaaaaagtgagcatcatcgattcctccctttctattgttggtcggattctgcttcagattcgtcagtatcaccccagacagcatcataaacgacatcgactagggctgtccgggtgacaatcccaacaagttgatgatcatcgttgataacgggaacgtatttccagccccgtttaagaatccgttcaatggtatcccggaccaaatcattttcgttcacgtaactaatcttggtagacataatgtcaccaacactagttgcgtctttgtaatgatggtcgatattttcaatatcgacgagtccctttaaatgttggttttcgtcgacaaccagtaaggtatcaacgcggcgttggcgcattaagcgaatcgcatcaactaatgatttacctggtgtgatagcgactggacttttaagcatgatttggccaacagtttcgacatttggtttggcttcgatcaaacgatcgtgaccgattaagtcttcgacgaattggttggcaggatttcgcaagatttcattgggcgttcccatttggataatttggccgttatccatgatggcaatgcgtgacgctaatttgagtgcttcatccatgtcatgggtgacaaagacgattgttttaccgagttctgattgaagttgttttactaagtcttgaagtgcctcacgcgtaattggatcgagagcaccaaatggttcgtccatcaaaataatatcttgtccagctgcaagtgcgcgaatcaccccaattcgctgttgttgtccacctgataattggcttgggtaacggtctaaaaagtccgcaggcatttccactaattttagtaattcgagcgcctttgcatggcgtttttctggggaccattttaagagtttagggacaattgtgatgttatcttgaatagtcatgtgtggcattaagccaatattttgaatgacgtaaccaatttttcgccgcaatttaacggggtctacattagcgagattttcaccatctaaggtaatcgttcctttggttgggttaatcatgcgattaatcatccgcatggttgttgttttcccagaaccagacgtcccaatcaaacaaatgaattcgcctttgtcgacagtaaaactgatgtcatcaacggctttgttaccaccgcgatagagctttgaaacgtgatcaaacgttagataatgtgtcataaggaacctcctattgtgatgattggaaatttattgctatataataactatgttagatacgtaacatgcaactgtcaatgaatatgctttactgataggtatcaaaaagccggtgtaacggaattgagaacgttacaccggccattaattaacctgttgatttaggacgataaagaataaagtgggcgattaaagcgagacattgataagctaacgctaagagacaaacggcgacccagccaccgaagctccaagcgagggcgccaaagaatgaaccggaagcaccacccatgaaataggcaaacatgaagacggtattgttgcgactactagtggcttcaccaagcatttggacccgggtttgattggcaacctgaccgcactggtttccgacatctaataaaacaatcccgagcattagaatcggcatgaaatgcccccagaataagaataaaagataactgatggtcatcatgaataagccagtggcgataataaagcgaggtgatttagcatcggctaagcgaccgataattggtgcagctaaagcaccagccgcaccaaggattgctaatagaccaacggtaccactaccgagacgataggcgggactggccatatagaaaatgagtgtcgaccagaaaatactaagtgtcccaaacatgaaaaaaccgttgatggcggattcccgtaacagccgctggtgcgcgataagccctggaattgaactgattgtctgccagtagcttggcccgttttttggacgggaatccttaggtaatttgagggctgccagaaggattaaaagtgcaatcgcaattgtagcgatgagatacacccaacgccaatgaatgtaactactaataatgccgctaaagcttcgggataggagcacacccattagaagaccactgagaatggtgccgagcactgcgccccgtttttgtggttgagcgaggacggctgcatatggaatgatgatttgaggaaccactgaggtgaggccaatcatcaaaccagtcaaggcaaagaaaatgaaattgggtgctaggtaagcggctaataaggatagtaaggataagccaagcatccgtaatatgagctggtaacggctcatcacatcaccaaacgggacaatcagcaacaagccaagtgcataaccgacctgtgtcaacattgcaacagtcccgaccgcaccacttgtaacgtggaaagtggtcgctacgagtgcttgaatcggttggatgtaatatagattggagacggcaacgccggtaataaaagccatcaaaaggattaatggctgcgtaaggactgttttttgcggagcactttctgacatactagggtggacctacctctctgaataacgttcttttagaatttgaagtgcattgtcgaattcaacttgggcttccggttcttcttcacgctttgcggctgtttctagaaagtctaaaatttcaggcgtgacatcgcgcactaattgactgagcgcccaagcagcagtgccgcgaatgacagggcgcggatcagtatcgatgagttcgagtaacctcggaatcgcggtgcggtctttcacgttggcgagtgcgataatcgcattgcgttgaagtggctttttgccacgccacgaaccagcaaggtgtccaaattgaagtttgaactgcttgttactgatggttagcacgggctgtaattcgggcatcacagattctggatctggctccatatcaggatggaagtggaagtcttttcctttattaaacggacatacttgttggcaaatatcacagccgtaaatgacactgcgaatttttggtctgaattcttcgggcatgaaccctttggtttgtgtttgataggataagcaacgcttggcattgaggcggccatcgcccattaatgcctgtggtggacagtaatcgatgcagcgcgtacagctgccgcattgattggccatcggtgtgtctggttcaaatgggatgttggtaatgatttcacaaagatagacataagaaccgaattcgggtgtaattaataaaccattcaaaccgatgaagcccaacccagcacgttgcgcaacagccacatcgctcagttcgcctgtatcaaccattggcttaaaagtaatttcagtatctgaatcagcaagtgtttcgatagcgctgatcagctggtccatcttatcgcgcagaatatcgtggtagtcaatcccccacgaagcgcgggtaaaactaccgcgtttagcaccagttcgcgctggcttattgatgatttttgttggataggcaagagcaatcgcgataatcgatttaggttggtcgaaaattaaatctggataaaggcgttcttcaagcactttatgttcgaatccagtcgaatgaccatttgctttttgttccttaagacttgcttctaaataatcaaaaggcgctgccgatgtgaaaccaatcttatcgatgccgatggttttgctcgcctcaatcacttgttcttttaaagtgggcattcaaagccacgctccttttttaagtttcatgtgaaacaaatgggttatgctaaataaattttgcgcaggtcagctaagttgtgttggcttaactggagatcgtgtgataaatagtcttgcaacgaaccattttcggattcaatcgcttgtttggcggtatcgaggtaatcttgatgaaccgttagtaatgactgataacttttgaacacagactggttctgtgttttttgttgtagttttgcaagcgattgggtcacgaaagcggcagaagcttgattcgttaataagtaatctgtgcgaatcgtttcttctggaacactgagtgcactcaacaagaaaacagcgcccatcccagtacgatctttaccagccgtgcagtgaaacagtaaggattggtcctccttatcgtttgctagcaacaagtcgaaaaattgccggtaagcttgcttggagtgatcttggttaattaagtcgacatagacttgaatcatatgttcatgaccactttttggatcagcactgaacgttttaaaaagatcagcttctgatgccgtactagccgtttcatcaattttgaaaacgggtaaggattcatagattgcattggcagggaccttgtctggtgacttggcagtttcttcaggtgagcgaaaatcaacatcatagcgcacgccataatcagttaaataagctaaatcatgtggtgttaggtgggctagactagcggaacgtaagactttatgccatttaagggtccggccgtcttttgtttgatagccgcccaattctctaaagttatggcctttttcaagtggcaaaatgcggtgtgtcatatgcgtcaactccttatccaatgataccaatattgtagcatatttaatgggcaatcaacttaacttgtcagtatgtggggagaaacagtatgataggggtattaagagtggagtgagcagatgattacgtattttgaaatgacacctgagggccagttggttgaaggaacctctgaaaaaagtgccgactggattcattttgaagcaccaactaaacatgagatgcaccatttcgctaaaaaataccacttaccagcggtgttatttgaggtggcccaagatatcaatgaagtcgcacggtatgaaacatttacaacggacaccggtgaagtattgacccatatttgtttactggtaccagttaaaacccatgattcagaagatcatgcggaatatattacgcggcctttttcgttaatcattagtggccagacgttattaactgtggggcatcaacagtccgagctcatcgatgaaatactcacgttagaaggcctggatggtcaaattgaaacggttgctctaaagagtgtttcggccatctatcaacgttatttagcggctttagcggtcgttgcgcaacagattgaacaattggaagaaaatgtacatgtttcgacacgcaatcggttgttgtatgcactcaagtctcttaaaaagagtgttgtctatttggatttagggcttaagagtaaccagcaaattattccgcaaattaaggcaagtccattatttgagcgcgtgtcaggacatacagacttactgtatcggattgacttgcagtttgccaagtccgataaggcgattacaacgtatcgtgagttattggcacagttaagtgatttgctttcagatattatttcaaaccgattgaataatattatgaagacactaacatcactctcaattattctaacggttccgacaacgttaggtggtttctgggggatgaacgtaccggtcccgctagccgagagtaagttagggtttctcgtgctattaggattgtcattggccattagcctttgtgtcggttggtggttaaaaaagaaagactacttctaattaaatgttcgcggaagcgcttcgcttttttgcttgaattgtttttccaagcggtatattcttaaagtgtaacaggtgcatatagagaaagtgagatgaacaacatggttcaagaatataaaagaatactcgtcccagttgacggctctgaagaagctgaattagcactaaataaagcagtgtgggttgctaagatgaatcaggcgcgcttggatattttgaacgttttggataccaagcaatttgcagggagttatagtggcatgctttcaggagacgctattttccaaatctctgaagatgcacagaattatctcaacagtttaaaatatgatatccaaaccaatgacggtttgaaagatgtcgagattcatgtgcggtttggtaatcctaagaatgttatcgcacgcgacttcccgacagaatatcaaaccgatttaatcatgatgggctctactggcttgaatgcagttgaacggatgttgatgggttctgtgacagaatatgttaaccgcacagctatctgtgacgtgttaatcgtcaagactgatgttgaaaatcgcccttatcaaaaagcaagtaagaaaaaataaataacaatcccaaaggctaaaaaggatgaattctttttagcctttttgcgtatttcaatttaggaggtggtaataatgacaaaagctgattggatgtatgattcacctgaattattgacgtattacaaaacagagtggggaaaaccggaacatgatgaccaacgcttatttgaactattatgtatggagttgtatcaggctggcttgagttggcggactgtattaaataagcgtgctgcctttcggacagcatttaaagactatgaaattgccaaagtagcgcagatgacaccaaccgaaattgagcagttactgaccaatccggcaattatccgcaatcgtgctaagttgaatgcaacggtcaataatgcacaagccgtccttgcgttacaaaagagtgcaggaagctttgatcagtatctatggggctttgttgatggacagccaattgtaaaccggccccgaacttgggcggatgtccccgcaaaatcagagctatcgatccaaatcagcaaggatttaaaacggcggggctttcaatttgtcggaccagtcgtcatctattcattcttacaaggagctggcgtaattgatgatcatctgatgtcacagtaactttttggtgcagtcagtcgcgctaatattgcggatggtgtattatggagggatagaattcatttagattaattaaaggagtcccacatatgacacaggataatgttcgccaattagcagattggttagaagaaaacatggcagcaattgccgatcgcaaagtgcaattaaatccagaaacaatttttgctgttttggatgattttggcgttttaaataacccggtcgttaagtattttgatattacagaagaaacatattatcaatcagagtcagatcataaattaacgttatcagatgaccacaaattattaatcgatgtgaccgatcggattatggtgacccacgtggatggtgttttagctgaaaacaaagtcaactttgaatacagccacgaagctgtttatgaagatcaatatctcgttaaacgcgatttagaagtgttgacatatggtttggctgtcattggtgcagtggctgcaaccgttaaacataacttaatccaagctgatttgtctaaagatgctgtgttgagtttagctttggctgcgcaaaacatcgctaattggcaagcaaaataatccagtaaaggttggcaagttaaatgggagcagtgctagaattgcgtgatttttcgcaaaaatatcagcggcgacaactttttaaacgtctcaatttacggattgatcggcaagcttgtatcgcgattactgggcaaaacggcgcggggaaaaccacgttgcttaacgtactagcaggattgacgaatattgaacgcgggacactggagattgcaccgaagatgcggattggctatatggctgaacaactcgcaccaaatggactgacacctaagacttatttgcggatgctaggagaattagatcagtttagcaatcgaaatttagaaggtcagattaatgaattagcctatgaatttgggttagcggcggcacttaatacaccgttaaatcaattgtcacgcggtagtctgcaaaaagtgaactttgtgcaggcgattttgcggaccccagatattttattgctagatgaaccgttggctggtcaagatggaacgacccagatgcggatgattcattggttgaaagactaccgccaaaaagggggcgccatcattgtcggcactaacaacgcttttttaatcgaacagttggctactgaaatttatgaactagatgcgatgcggctattgccgattgaagaattaccgcagccggaagaaaaggtgatgcggttagaatttgcaactacaccgcgatcactcgcacttcccgctactttacaacagttagctttaaaaattgttgatggtacgcggtacgtcgtcttgtatgcaaatatcaaaaatagtgatgaattaattcaagcaatgttaaaaagtggctttagcctaagggggttacgttatgaagtcctttagtgcacagttacgtttgcatcagaaaatggtttttgataatgggaatttgtgggggcctttgctattttggatagtggccttattagtcaattatgcggtgcaaccacaagatttcgtcggcagcctcgctacattattaatgacactgtttatcttattgacgtggttgacctacagttacatcaatcaatttccccttcaaatggaaaaacttttaattttaaaattaaagaagcaacgccgtttttatctcagtttaattagctatctcatcttgttgggattattctttgtcctaattgggatgggaagcttggcaattacttacgtgctcaatgggcaccacgcttttggtcgaggacttagctggtgggattggctaggcgggaccttaatgttgacgagtattttacctgtttcagtaatgaccggtttgttctggcaacggcgaattttagtgaatcgccggatggccggtacgttgaccatcttgatggtggttctcggcagtttaggtgaagcgattgtcaattactggcatccctacctctatattctggggattttgccacccgtttcgaccatggcgcaactcttcaacacgttgggacacatttcgctagttgatattttattatcatgggcaatgagtcttggttatagcttggtcttattattgattgatcaattaattttaagaaggcgtaaattcctattttaagaagctgacaggctgctataagcggtttgacagcttctttttaagttgaattaagcggttacgggtgaaaaaatcttaaaaatgtggcatgattaaaaagaattcaaatcataaaaggagcttttataatctatgacaaaaattgcaatcgctggctcaggcgcaatgggcagtcgttttggttacatgttacaatcagttggaaatgatgttgtgttacttgataattgggcagaacacgttcaagcaatcaataccaatggcctgacggttgtagaagcggggcacgaacccgttcaggttcgaattccggctgctttgccaacggatattaaagaagttcaagacgtcattattttattcacaaaatcgatgcagctagtcgacatgttacaagccatcaaacccttaatcggtgctaagacaaaagtagtctgtttattgaacggtctcgggcatcccgaaacgattgaacaatacctgcccaaagaaaatatttttgtcggcattacactttggacggcggggttaacgggaccaggtgcgattacattaacaggctctgggaatgtcgaattacaaaatgttgatccagatggcaaagaatcggcacaagcattagttgccttgttgagtgcggctggcttaaatgcgcaatatagttcagatgtactcttttcaatctggcgtaaagcctgcgttaatgggacactgaacagcttgtgtgccttgttagactgtaatattgcacaattgggccaaaccccacaagcgcaacaactcttgcgttcaattgtggcggaattctcagcggttgctgcaacagaagccgttgaattagacattcccacgacgattgcccacatcagcaagatgtttgcaccagaacaagcaggtggtcattatccttcaatgcaccaggatttagtgcaacatcaccgcttaaccgaagtggattacttaaatggttacgtggcacgcaaaggcgccgaaaagcacattgcgaccccagtcaaccaattaatcacggaattaattcatgccaaagaagcattattgattaaataaacgaggagtcttaactaatgacagaaaaacgccaattaaatatcgaagttgaatcaatgcactatcaaaaattattaattgctatcgatgatgatgacacaacctcatccaaacgggcctttaactatgcttgtacgcttgctaaggcctatcaaattccattagggattgtcagcattttggaaaccggcgatttgaacatttatcaatcactctcaccaaacgtggttgaagggcgccgagaagaaatcgcagccgatctagatgtttatgttcaaaaagcgaaagaattcggggttgaagatgtgacgccgattttaaatgaaggtaatccaggacacgtgattgttgaagaagtgattcctagtttccaaccagacttggtcatctgtggttcaaagacgaaaccatctaaacatttaatcgggacacatgcgagctatttagcgaaatacgcgccatgttcagtcacagttgtacggtaaattaagtatttggagatcagacgaatgatagaatgtacacaatgccatattaaatatgggcgtaaattgcaccaatgtcccaattgcggtctagtgcaccaatcaacgcaaacaaaacagcaaacatcgctcctgcaacaatactatcaatttttagcgcggagtttaaaacaaccgctaaaggtgcaatggcagtgggccaacctgtggtttggcttagtcacgtttggtctggttatattaatgaatactgcaacggcaagtttgctcattgccagttggtcagaacaaattggtgcggttgctggggtgatggcgtcacaaattgtcttgcgccaacggctaaacttattaccgcttgatatgaaggcactcggtggacaactatttattctggtggttgttttgggaatcggatttttactcaagcgttacttattgaagaagacgacaaccaccttgcgcgcgtatctaacggagattagtgcgtacagtgggataaccgttattttagcattagctgcgctgttggctgctctatgtttcgggatgaccgccatctggttcgtcttaatcatggttgcagtgatgtacgtcagtttgaacattgcggttgggattagtttatttcaaactcgatgggcagcttttgatcgcgtctatgctattttattatttgaaatcttaacccatgttgtcttggcaattggcattagccaaatcgtgattttaaacctactaacaggactctaaaaaataaaagtgcgtattttggtacactttttcaaaagaggtttatcattagagttgtaaaaaagaaatgggaggtttttaatatggcagcagctgttgaaaaaacattggttttagatatgaagatgtcagaagcatttgattggagtgacgataacacaatcgtccgtgatgctttgtgggatcactatatggaagccaacggccggaacacggataaaaccgttgaggcaatgaaaccctatcttaagatgagcgacgcggaagttagagaaaaggcagaagcgcttttaaaataaggcaataaaaaaagacccgctaatcattgttgattagcgggtcttttttgggtaatcctcaaagccaacccgttcgactcagcactctaaacgtgcttcctgtcgcagtaatttccgcttaatctaaaaataacataaatcctaaaacctggatttatgttatttttgaattaatgctcaatgactaagcgcgacagtcagcactctaatcatacatatattctcttgtcattgggaggtctcttgcgctggggccttttgatacgaggtattgaatgacatcaatgttcccagattcaaacgatgaggcacatgcttggagatagagatcccacatgcggacgaattctggacctgcttttggtaaaatgacgtctttttgggcgttaaaattagcagtccagatttccagcgttttttgataatggcgccggaggggttccatgtcggcaatttgtagtccggcattgataatgtgttgtgtattttcaactaaaccgggtacatagccacctgggaaaatatacttattaatccaggcattgcgcgcaccgccttgttgacgggtaatcccatgaaggagggcaaccccatcatcagtgaggtagtcagcgatatcttggaagtaggcaccaagattttcttcaccaacgtgttcaaacatcccaacactggtaatgtaatcgaatggggcgtgtttgagttcgcgatagtcaacaagttggacgctagcaacatcgctaaggccctcgtcattaatccgttgttgaacgaaatcatattgttcctgactcaaggtaatcccgaccactttgagatgatattctttagcggcggttaacatgagggtgccccaaccacagccgatgtcgagcaatgttcggttaggttgtggattgagcttgcgtaaaatatggtgcactttattaatttgtgctgtctctaaatcatcagttggtttttcaaaataagcacatgagtaagtcattgttttatccaaccaaagttggtagaagtcattccctaaatcgtaatgactttggatatcttttttacttgccttttctgaatgcgattgttttggaatcagatgaatgtagcgactattacgcatgaaactgtctgcgctagtgtaagccgccgttaatagtttttgaagtggggtatctgttgtattacttgtcacttcaaggtcgccagccatgtacgcttcgccgagggctaatgatgcgttgctggacaattgtttgatgggaatcgcttttttaaaagtaatcgctacttcaggctctccagaaccataggtttcggagctgccgtcccaatagttgacagtaacagggaaatcaaaagagtgttgtagtagtttcttataaaaagttttttctaacataccgaaaatcctttctaggtgtaaatttgaagtaccagagtagtatacgactatttttaaaaagatgtaagtcgcaactatcggaattccagaatatccaattagttcgaagtgttgtaaaataatgatatagaattgccataggaggaaagttgcgtgagtttatatcaaaaatttgtgacgaatcagcagttaagacgagttgtagtgctcttaacgttgattggggtcatctatgtgtcacgctcgatgatgaatatcattttgctgacgttcatctttacttttttagtgactcaattagtacgaaaggtccaacagtattcaaaaattccgcccgcagctgtggttgtgccgctttatatgttggtgatttttttagtgtatctagcagtaacgatttatgtgccacagattgctaaacagtcaattaaattaggcgagagtgtctataatttctaccaaagtccatcatttgatgcgaatcaatttatgcgaaccattggggattacatgaaacagttcaacttgacggatcagttgaaacacggtgtatcaacaatcgttaattacgtcaccggaatcggaacaatgggcgtcacaattgtcttatcgtttattttgagtttcttttacacaattgagctagaccgattaccgcagtttggaaaactctttttgaagagtacttacggctggttcttccaagatatcatgtattttgctaaaaaattcgtgaatacctttggcgtggtaattgaagcccaaatcttcattgcaattgtgaatacagtgttaacaacgattacgttaacggtaatgaaaatgcctaatattccgagtttagccatcatgattttcctattgtcgatggtaccggtcgcaggagtcatcgtttcatgtatcccattgtgcattatcgccttttcagtcggcggaattcagtatgtggtttatatattggtgatgattttagtcattcatgccctagaagcatatgttttgaatccgcgatttatgtcgagtaaaacacagctgccaattttctttacatttgttgttttatttgtagcagaacgtttcttaggaacttgggggttaattgttggattaccaatctttacgttctttttagatgtactaggtgtgaagaccattcaaaaatcgggtaaaaaacaaaaaaaagcggctaattgatgcggttaggatccgcaacaagggtggccaattggttaagatcgatttgcaattcgatagcaacaataaataatgcttttagtgatggggcagcgcctttttcccaccggaagatcattgagctactaatcttggtattatattttgcgctgagtagatcggcgagctgttgcattgttagattcttagcagttcgcttatcgtgtagtaattgtccgaacatttagcaccgtcctttatcacgcgtttgacttataagtttaattatatgacaaatgacgtcaataagtgaacacttgggactaaagtttttaattgacagagttcttacattatcgtaatattcctaatgtggaacgggattgataacgtttcttgggggtgctgaatgtggcagaaaaattatttgttctatcaggttatttaaagggtcatgatttgaaacagcaagttgttgctgatgtattgggcaaaacattaacgacggctaatcgtaagattagagggaagattccatttaccgtcaaagaaattcaattactacatgaccgcttgggaattccaatcgacgtgtttttttaagaatagttcctaattaggaactaagtaatcagttttaaatgaaccaaataaaaataaccctgtcgactgaaaatcgtcgacagggttatttttattggctattttgctttaaggagttctaatttaccttgaacaatcatttcgcaaagatcaggataactgataccaagcacttctgcttcttgtggaattaatgaaagtggcgtcatcccaggtaatgtatttccttcgatcacgtgtaagccattttcaggactccagaagaagtcgatgcgggcgtagttcgttaagccaagtgcttgcatagcatcaagtgccatttgtttcatggcttcgtgcacatcatcaggtaaatcgtttggtggtgtgacaaattgagtggtatttccagtcacgaatttgtgctcaaagtcataccaaccgtcattaacgacgatttcgatggcaggtaatggttgaccattaatcacgccaagtgagaattcgcgacctttaatgaattcttcgattaaagcttcgcggtcgaaacgaagcgcatcttcgacagctggttgtaactcagcttcgttgtgcacgatatgtgtcccaacacttgagccaccgttacttggttttaccacgacagggtactcaaatgggatttctggcatgggttggtcgcgataagcagcgacaaaccgagcagttggaatttggttatataataagatttcctttgaaacctttttactcattgtaatacctgctgcgagtgtgtcactaccggtataaggaattccaaagagatcgagaaccgcttggactttaccgtcttcgccatcgccaccatgaagtgcgaggaagacaatatcagcagttttacaaatctctaagacattcgggccaaagagttgtgttgaaccatcagtacgtaatgcgttgatggcgtcgtctgttaaaacttcgtcgctgatgtcgtaatctttttcaacaggtgttgaagaataaagatcatcgattgatgcgacgtcgtgcaaatcatttcctaagaaaagatcaacgaaagcaacgtcatggcctttcgtttgtaatgcattggtaattttgtgtccagacgttaatgaaacgttacgttcggtactacgcccgcccgctaagacaacaattttcatatgaacctacctccgaatatttttggaaccttaagtatagcacaaaaccatattaggcgggtatcaaaaagctgaaaaatcagtggtctagtttaaaaattggcactcaacaacagcgaatgctaattacttgcatttcatgattaacggactagaatagagttgtaaagattaagaaaggaagttttagagatggcaaacgaattaatgaatggtcgtcaaaattggctagataattttggtggagatgattggttcaagaatttcggtcagcaattattggcaatgtcgcctgaaacggacaacttactcaaaacagatgttaaagagaccgataaggattaccaattagcggttgatttaccaggactggacaagaaagatattcacgtggattatcaagataatacattgaagattagtgctaaacgtgatagtttcgctgatcatagtgacagtcaaggcaatatcgttcaaagcgaacggcattatgggcgctttagccggcaattctacctacctggtgtcaaccgggatcaaatcgatgcgcaatatcaagatggcgtcttacaattaatgttaccgaagttaagtgaatcagaccaaccaacgaacccaattgaaattcgttaattaaaaaagcggcaccaaccataaaatggttggtgccgctttttgagttatagaaaaagagaggcgtaaaacaatatgagacctgctacaagagtacaacatttaaatttggtgagtaaggcaatccgccgctgttgaatgggtgaatcgagtgggagtatgacgacttttaattcattttcaggatgcgcttgtagataagatttccaaaaagtatgctgtgcttgaaaagtcggcaacttaaggtagagaaacgcgataaaaatgaatgcactccccaaaagacggattgcaatgttcagggcatctagatagagcgctgttagacagccaccgattgataaaaagaataaaaggactaaccaagatgttaaaggaacagcttgcttgtaaaaggatgcgttgaaataagcttgtttcattgattgttgcgctttgtaagcttggtcatccgtgtcaggatattggtccaagaaattttgcttgagtgttggctttagcatattgagacgcacgataaaataagatgaactgatagctaacaggcaaccaataacagtgagaaaaaaggcttgatttggggacaaaataatacctcctaataataaataattgtagtatagcaaatatttttcaactattaagatttaatcagtaattttaatatttcattgagagataatgcgctttctaaatgaatacggtatagttaaggtaatgaaaagtagggggttggggacgtgctgactttatcacatttatccaaaagtttcggaacgatgctagcggtcgacgatgtttcatttacggttaagtcgggcgaaatattaggcttaattggtcaaaatggagctggaaagacaacgacctttcggatgatcttgaattttatggcaccagatacgggaactattctctggaaaggtcgcgcgtttaccgctgcggattatgaccaacttggctatttgccagaagaacgaggattatatctaaagatgaccgtggaacaacaaattttgtactttgcacagcttcgtgggcgcagcatcgcagacatcaaaccacagattgatgagtggttggtgcgctttggggtgaaaggtaagcggactgataaaatcaaggatctttcaaagggaaatcaacaaaaagtgcagttgattgcgactttgatccatcaaccggaactcattattcttgatgaaccctttagtggactcgatccagtgaatgcagaacttttagaagaaggtattttatggcttaaagaacaaggttcagcaatcattttttcgagtcatgatatgacgaatgttgcgcggattagtgaccgaattgtgatgttgcgcgatgggcaagtggtgctcgccggtacaatcgatgaaattcggaatcagtttggccgaacgcaattattcttagaagtaccgttagcacgcgaaactttagcaaatatcaacggtgtttcacgtgtaacacagcacgggcagcggtttgaattaactttggcagacgaaacggttggtaaaacgattttcgacttagcgacacaaaatggctatatcctagagtttagtcaacaagcaccaacgctcgatgaaatctttagaatgaaagtggaggaaggccatgtttaagtttaaggtgatttttaaacaagtatttctaaagaatattaaaagcccagcgtatctaatcatgattttgatgccaattgtgatgctcgggattacgtttggtgtgagtcgcttgatggatcatagcaaagaacccgttagaattgctgttttggcgccgcaaccagcagaacagagtgaattacagcagttaaaaggtaaaacatatcaaatcgatcagcagattacgactcgggaacaagccaccaaagcgctccagaaagagcgaattgatggctatttgttgttgagtgaggaaaaaggacagacaatcagtcgctactatgaacgaaaagatagtccatcatttgatgcgagtgtcttagagaatcagttaaatcagattcatttagtagctttggcgcaacaagcaggcgttgcacctgaacagatccagaaattgatgacgccaactgtcattgcaccagtgacggttaattaccagaatggtcatgaaaagatttcccaggaaaacactaaagaagtgggccaaattatttcaattggaattacggtcttaatgttcatctttatcgtgaattatgctggaatgattgcccaagaaattgcgactgaaaaagggtcgcgaatcatggaaatcattctatcaagtgtttcgattgaaattcaatttttcgcgaagattgccgcgatattagccctattactcacccaaattactgtctatattttagttgggattgtcgggtttcagtttttgaaacagcaactaccgttagcagagttattgccgattattcgtcgtgctttggttgcgccagcaatgtggtatgcaggagtctttttaattattggggtattactctacaccgtattagctgcaatgttaggcgctgttgtgtctcgaatggatcaggtacaacaagccatttcgccattgattttactgggcacattaagttatttgggtggctttgtactggcatcacagaccgatattccattattgcgggcggtgagctatgtgccattgttttcacagattatgttacctgtgcggctggcaaacggtgatgttggcgcgttcggggctagcatgggactcttcatagccatggcgacactaattggactgacttatttagcattaattatctatcgcatgaatattctagtttattcggataaaggtgtttttaaagcattaattgccacctatcagcaactcaaagaatcgcgccagtagaagatttttacaactaattaaagcggattgatggtatgatagagccatgtgattttagtagcaaggagagcgattgaacgatgcaaaaacgatgggtaaaattcggattggcactcttaggggtgacactggtattggcaggctgtcaaagtaagccagcggacaaagaaacgttggtcaaaaagccctatgaaaaaagtgattactatctcggaacgatttgtacattgcgaatctataataaagacaaggaagccgtgctagataaggcttttgcgcggattaaaaagtccgaaaatcaagcaacgttaaccaaatcaggttccgaattggataagattaatgataacgccggtgttaaacctgtacaggttagcaaagatatgtggccactaatggaaaaagcgttacattatagtcaagaatcggatggcgcgtttgatatggccattggtgcgatcacagatttatggcaaattgggttaccaggcgcgcgggtgccagcacaagcagaaattgaccaagcgttaccattagtcgattatcatgacgttgttttgaataaggccaaacgtacagtttaccttaagaaaaaaggcatgcgacttgattttggcgggattgctaaggggtacattgccgatcaagttaaacaagtttttaaggaaaatggtgtgacatcagccgttattgatttaggtgggaatgtgattgttatggggcattcaccattagggaagaacaaaccatggacggtcggcattcaagatccgaaaaaggcgcgtggagaatcagtcggtacgattaaaggccgtgatatttcggttgttacggcggggatttatgaacattatctaaaaaaagatggtcatacgtatatttatctctttgatcgccatactggttacccatatgaaaataacctagcgagtgtcacaattatctcgcctaaatcagtagatggagatgccctttcaaacgctgtctttaataaggggattgtcgaaggcatgcagctcatcaacaacaaaccgaagaatatccaagccatcatgatcacaaaagataataaaatctatctatcaaacggtttgaagaagacgtttaaacttaaccaagattcaaattatcaagttgaaaaacaattaccaacgaaatagccgctaaattgcggcttttttgcaattatggggtcaaagcattaacggaaaaagtggcaaaatgttaaaattgggaaagaatctgcttttgaggaggacaatgatgacaaacgtgcgaatgcaagatgatttttatacggcagtgaatcaagaatggttaaaaacggctgaaattccagcggataaaccagcaacaggcggctttgtcgccttggttgatgagattgatcagcaattaatggctgattttgctaagatgtcgaccgcaaagaacgcattgttacaacattttctagattattacgaactagctgcggactttcaaacgcgggatgcactcggtatgaaaccgatcctaccaatggtagcccgggtgcaatctctcgatagtttagcaacttacaatcgtgggttagctgattgggtactttccgggttaccaacaccatttggcttatctgtcgatgctgacatgaaagacacagcccatcacgcgttgtatgcggaagctagcgacttaattttgccagataagacctattatgaagctgacaatcccaatgctgaccatttattggccgtctttacggatatgatggttcagctcttgcagaaaattgggattgcgcccgttgatgcaacgaagacggttaaattagcgttggcatttgatcggtcactggcaccttatgtgaagagtgccgaagaagcagcggattacacgaaactctataatccacagcctttgagtgattttatgcaacaacaaacgacgcttgattttccacgtttatttagcaaggtgctacctgttcaaccggaaaaaattatcgtgacggaaccgaagtattttgcgcaactgagtcagcttgtgacagacgccaatttcgaaacgttcaaagcgtggctgttagtcatgacagttcgtagttggagcggttatctgaatgaagaggcacgccaaattagttcgctctatagtcgtgcgttatctggtagcaaggaagctcgtccacaacaaaagagtgcttactaccttgccttagggatgttcaatcaagttgttggcgattattacggtcggcaatacttcggtgaagcagccaaggccgacgtccaaaagatggtccaaaaaatgattggtgtttatcaaaaacgccttgaaaaaaatgactggctaaccgaaaaaacacgccaacaagcgattgtaaaactcaaccaccttgggattcatgtcggttacccggatcagattgcccctatttttgcgaagttggtcacagtacctaaagcagaagatgggacattatttgaaaatacagctgactttattcgaacgattgaaacggaaaattttgcgaaacttactcaaccggtggatcgtaataagtgggaaatgggcgctgccacagttaatgcctattattcaccttcgaagaatatcattgtctttcccgcggctattttgcaagcacctttttacagtttagaacaaagtagcagtgctaactacggtgggattggtgcagtgattgcacatgaaatctcacatgcttttgataataacggtgcgcaattcgacgagtatggcaacatgcataattggtggcaagaatcagatttagctcacttcaagacactttcggaagaaatgattgcagaatttgatggcctagaatatgcaggcgcaacagttaacgggaaattaactgtctcggaaaacattgccgatgcgggtggcttgagttgtgcccttgaagcagccaaagaagaacctgatgttgatttggcagccttctttgtcaattgggcaacgatttggcggatgaaagctacaaagcaatatcaacaattattgttaaatattgatgttcatgcaccaaacgcgttgcgggccaatattcaggtccaaaacttggcagccttttacgagacatttaatgtaacgaaagctgatcagatgtacttagcacccgctaaacgggttgcaatttggtaaattaaaaaggtgcgccacaattgtgacgcacctattttagtagtgatgggggataaagaaatgtcagaaaaaaaacgcatgattaatggtcaaatttatcgggcgaacgattcagaattgcgagccgatatgaaacacgcgcgcgtacttactcggttgtttaatcaaaccactgaagaacaacaagattaccgacgcgaattaaccaagtctttatttgcgaaaagtggctcagatttatatattgagccaccatttagaactgattatggttgccaaacacgcattggtgagtatgtgtatatgaattacgattgcatcattattgatgtagcaccagtgacgattgggaaccacgttttctttggacctcgtgtaggactctacacagctggtcacccaacgacggcacaagaacgtcgggatgatctggaatatggtaagccaatcaccatcggggatgatgtgtggattggtggcaatacggttgttaatccaggcgtgacaattgggaacaatgtggtgattggttctggatcagttgtgactaaagacattcctgataacgtgattgcagttggtaatccatgtcgggtactccggccgattgatgaggcagaagaggcctactgggcgcagcaaaaagcaagttattttgaagcccttgctaatgaataagtttaccgagtagtgttaaatggagtagtcatcactaacaaagcactaagctaaatatcagcaaactaccgagaaaaagccgctagtactctataaaaagggttctagcggcttttttaaatgtttggtggatcaaactggcagcaaatactattcagaatgggtcaaaccgtaataagggttaattacgattggttttcatcagtactgcggtgccatggcttttgtaatgcttggacggcttgagcgatatctgtggcgtgggtgattgctgagataacggcaactccatccacggtagtctttgcgacttgagcaacgttttcttggttgataccaccaatcgcaacaaccggtagttcactttgctgcgttaagaaacgcaagcgattagtgccaagtgctggtttagcatcttctttggaattggttggaaaaattggaccaatgccaatgtaatcaagtatcggttgattatgactttggtgaagttcttgttcagtgtggcaagatagaccagttattaagccgtgtgctttggccgtttcaattttatgccacgggtgatcgctttggccgacatgaataccatctgcattgatttgaagtgctaaatcgagattgtcatcgataataaatgggacttgataatggcggcaaagggcttgagccgctgtcgcatactttaaaatcgcatcggaatcttgcagactaccagcacctttttcacggaattggaaacaggtaatgccggcttgtagtgcttgttcgagaatgtttagaaaatcatccataccggtattttgggtacccgctaccaaataagtttggaacatttcccgggaaatgttagtcatgatgaacctcctgataagcccagtgattggttggcccgtggccgtgaccaacagcaatcggattagcaattgcggcttggataaaggctttgctaatatgaattgctgctttcaaaggggtgcccttagctagctcggcggttaaacaagctgaaaacgtatctccagtgccatgtgttcgtttagtagcaattcgtggtgtagttaaccattcatcttgtccatcagcgtagaggacgtaatcggcggcttgtgattgatagtctaaatggcccctttgataatgatattcttggcgcccatttgttggagttggtgggccgcttgtttgaaatcagctgttgtctttatgcggctgcccgtgagaacttcggtttcgggtaagttgggtgtcagcactgtggctagcggcaataattcagtacgtagggtatcgatggcatcgtcggcaagtagctgtgcaccgcccttggcaatcattacaggatcaagggtgagcggcccccaatcataatggcgtagattttcagcgaccgttgcaacatgttcagcatctgccaacattcccgttttgcaggcacgaattttaaagtcagtagccaatgaagcgaattgttgattgattagtgatagtggtagtggcagactggcttgaacgccaagcgtattctgagcggtgatcgcgacaactacattggttgcaaaaacatggcgctcttggatagttttaatatcagcttgcataccagcaccaccaccgctgtcagaaccggcgatggttagagcttgtgggaattcattcatgagtaggcacctcacttagttggacggtatttgctactttggctggggtaatgtggaataaataatcgattaattggggatagaaggtcccaggtagcggtgtttccattgctgtggctactagttcgccggcaacggcaaatgtggcggctgcttcgatagcggcttggtagggatctgcaggatgaactgcaacaaatgcaccacagagtcccgataacatatcacctgaaccaacatgtgtttgaaaaattgaggtaccatttgaaatcagcgtaacgcgttgaccgtctgtaataatgtcggtcggacccgttaataaaattgtggtgtgtaatcgattggccgcggccttagcaataatgactggatcgctatttccatgcccggcatcgatgccatttacttgccaatctatcccagcaaaataagcaatttcacctgcattaccacgaatgagagttggtgtgccaagtgttaatagttgatcgataatttgctggcggtaggccagtgagccaactgccactggatcaagaacaacgggtttttgttgttgataagcggcggtcattagggccatcatttcttgaatctgtggtgtccacaaactaccaatattaatcgtaatggcttgtgcgatggtaacaattccctccgcttcttctggtgcattagacataattggtgaggcaccgattgcatttttgtgcgttggcgacctgatcaattgtgacgccatttgcgacattagcaacgattggattgagcgctctaactttttctaacagtgaaacaaccatataaaaacctcccttagaaactaaaaaaccacttttggatgcacgaatgcatagaaaagtggtgtgagtagtctaaagaaaggcactttcctacgcaagtctgaacttacaggttcaaagggatcaggctgtacaaacctatctcagttcttctaagaacacccctagtgcaaagcgattaatttgtaccctcagtatagagagtgtggtaggtgaatgcaaccgttttatttcgtgaagcagatagcatttgttaacttttaggtatagagcaatattttttgtgttatttagttaaataatcctttgaagaaattagccatgctattaaagagtttttgaatgaagttccgattgctttgggtgttgagcttattgaagatgtttttcgcaccactttggatattattcattaacttaccggcttgattcttgaaatcatccgaatttaaagcaccggaatcttggattttaacgagaacattaatgatttgttgtttttgattattgttgatgatgttggtgaggttgttttgttcgagttgattattgacgatggtagtaatttggttaacagtcagattattgcccttacttgccatgtcttttttggcacctgtgacggcattattcaattgggaatctgaataaccatcggtgcctttattagcctgtgtgatatcgctgagggtgctcatttcgtcttgagcagcagttacttgcgcttggttgagtgaatcgccattttcagcgaaagcggcgtaaacgccagctaaggcgccagagccatcgattggaatggcggaagtcacgtaaattgtcgcattcgtgacgccggcggttaaggccgcatttttatattggttggctgtaattgtagtgatgttgttacggccattaaaatcgataattttaacattgatgccggtattgctgtcatttttttgaattaaagcacttgagtagacacttgagttggcgttaaatgtttgttgattttgatcaagatattttacaagtgtggaaccggtcactgttagttcactgacatctgtgacattcgcggcattttccagtgtcttgagggtatcagctttttgggtgctagaaaggctggtcccaagagtggcaacgggtttgtcccacgatgtggtgctgtcggcaaaggccggttgtgcgctcagaccgataatagcagtaaatgcaatggggatgaggaacttcaatttattaaacataagcaataatcctttctcaaagcgaatgatacctttagtatagccaattcaagccgtaaagtatccgattttaactatttttaggaattaaagatgattttaaggcttttttaaggttgctgagtggggtgaatgctactaatgacccgtgtatgggttagtttctcgtagaataattgtggtcgtttagtcacccaacttaataagaagttaccggtgaataacagtggtggtaagagtgagagaccgataataaagagatagacgtcaaaatgttgttggccactagcaacagcggcatccagggtgacgcgccagagttgaaaactgggaatgacgatgaaaaataggagtagctggcgccagaagatcgcccaacgaggatgatggtcagcgacaatctgtagttgcaggagagattgaccaggtgttttgccacgccaaaaaacggggagcattaagaagtaagcaccagttgccaggcagtactgaagcatttctgaatgaatggtgggtagttttagtaatcgccagataacagcaattgcaaatgtaatgatgcctaacacacagtaatcaacggcaagtgccaataagcgccggaagtagcccactttttgaccgcgcgcataggctgcttgatccaaactttcacgagtgggtaagaaaaaggtgaccaagggctggagataaaatccaagcagcccgccagagatgttgagcaataagtcatcaacatcaaataaccgataagggcgaggataaataccatacagtccggaaagttgcgtgagttcaaagaatagggataacgtaaaactaagtaataaggtctgtttgaaagacgttttaaagaagtaacgtaaataaatgccaaatggaacggttaaaaagatgttaaacaacggctgaatggttgccgcttgtttaagtgttgcgaggtatgaactcggttcggtccaaacgaaatgggttgagttgataaactcccggacaaacgtaaagggaactaagttatagcgcggggtggttaaatgagcgaccaccgagcgtgggggaggggaagaataattaagcagtaagcggctaccaagtagaacatgaagctgtagagaattacactacgcaggatggttagcgaaccataacgatgatagtggtaaactaacagtggaacggttaagatgattgcgacgaatggaaaggcaattgccacagtaatgatattgctgacgtaaaccatgatgagctcctttggtgttagatgtggttatattgtatttttttaatgaacgcctgtcaaaacagggatcattgttcgttatttacgttcgtattttatcggttatatgtatcgttaagattttactgaataaaggctgattagagattttaaagttcgtcttttatattgattttgagataatttgttgctacaatagtttttgtgagttttagggtttaaatagcggatctgaagacggattcgaatagaggagtatgtttatatgacatctgtagtagttgttggaacacagtggggcgatgaaggtaaaggcaagattaccgactttttaggtcaaaatgctgatgctatcgcgcgttatcaaggtggcgacaatgcaggtcataccattcagttgggtgacacaacttaccatttacaattaattccatctgggatttttaacagtgacaaactcagcgtgattggcaacggggtcgttgtaaatccgaagaccctcgtttctgaattgaaatatctaacggatcaaggaatcaacgtgagtcaattaagagtatcagatcgggcacacgttatcttgccataccattctaaattggacggcttacaagaagcagccaagggtgatcaaaagattgggacgactaatcgtgggattggcccagcttatatggataaagccgctcggagtgggattcggattgccgatttattggacaaggaactctttgcaactaaattaaaacaaaacttagacgaaaaaaatgcgctctttactaaaatctacggcgctgaaccacttgaatatgagacaatgtttgcagaatattatcaatatggtcaagaaattaagcaatatgtttgtgatacttcagttgttttgaatgatgttttggatcaaaaggggaatgtcttatttgaaggcgcacaaggcatcctcttggatatcgaccaaggtacgtatccatttgtgacatcatcaaaccctgccggcggcgtttcaacaggttcaggagttggtgcttcacggattgacgaagtggttggggtggctaaggcttatacctcacgcgttggtgatggcccattcccaactcagttagatgatgaaactggcgacttcattcgtgaagccggtcatgaatatggtactgttactggtcgcccaagacgcgttggttggttcgactcagttgtgcttcggcattcaaaacgagtggcgggtgtgacccaattatcattaaactgtgtggatgtcctaactgggattaaaacattgaagatctgtgtcgcttacgaattagatggcgaacaaatcgatcgttatccagcaagtctccgcgaattagaacgttgcacaccgatttatgaagaattacctggttgggatgaagatatcacgggtgctaagacgctagaagacttgccagctaatgcgcggcactatgttgaacgaattcaagaattagttgatttaccattagcaacatttgctgttggtccagatcgtgaacaaacaaatgtcttatctgctatctggtaggtattgctgaaaaagagtacaaaaaaagagaatgcaaagttcgttttctaaacgtgtcgttaaacacgccaacaaactttcattctcatgggtttggcaccagtcagtattatacacacattaccactaaaaagatagtgggaaaattagttggtttagaggagtcgttatggaaagagtaagtcgtttcttcgggattgaagaacaacattcaacagtgcaacgggaaatcctagcaggattcaccacatttatttcaatggtttatattttattcgttaacccgagcgttttaggtgattcagggatggataaaggggctgtttttgcagccacagcattagcaagtgcgatcgggtgtttcttgatggggttatatgctaaatacccaattgcaaccgcaccagctttagggattaatgcctttttcagttattcagtggttatcgggatgggtgtgtcatggcagacggccttagcgggtgtatttgtggcttcattaatcttcatgttgattactgtctttaagctacgggaaatcattattgatgccattccgcggaatatgaaactagcgatttcagctgggatcgggatgtttgtggctttcatcggtttacacggtggtggcttgattgttgcgaacaaatcaaccgttgttggtttgggggacttctcgcaagggacgacttggttaactgttttcggcttaatcattaccgttattttaatggtccgtaaagtaccaggagcaatctttatcgggatgcttctaacctcaattgtgggagccatcagtggcctaattaagttgccaacacactttgttgcagctgcgccaagtttgaaacccactttcttagctggtttaaatcacattggcgatatcaacaccgttcaaatgtgggtcgttgtactcactttcttattagtgaccttctttgataccgccgggacattggtcggtttagctgaacaagccggcttcatgaaagataacaagatgccccgcgttgggaaagctttggtatcagattcaacggccatgttagctgggtcattactcggaacatcaccagttggggcctttgtcgaatcgtccgctgggattgctgttggtggtcgaactggtttaacggccgttgtgacgggtgtgttattcgtcttcagtttattcttctcaccattattgacggttgtcacgtcacaagtgacggcccccgcattagtgattgtcggtgttttaatggctcaatcattgaagaaaattgactgggaaaaattagaaattgcaattcctgccttcttaatcgttctaggcatgccactgacttacagtatttctgacgggattgcattgggctttatcgtctatccaatcacaatgattacagctggtcgtcgcaaagaaattcatccaattatgtatgttttattctttgttttcgtggtctttatgtacatcttaaacgtaaaataaacaacaaacgcacagccgaaagtttcggttgtgcgtttttatgtgttgctgttattaattgcgaatcacaaggatttagagccggtaaatataaaatagtgtgttacaatagtcgtaaatactagtgaagggtttaaactgttatgcaaaaaaagacaagaaaccgattaattaatggcttattagccattctgttagtggttggattagtgttggtcttcatcaatccaatccgcaaccaactggttaaaatgatggcgcatcgtcagatggacgtcacagctgctcaaattaagaaaaaccaacataaaaaagcgagctttgattttgataaggttgattcactcgatacaaaacagattgtgaatgccgctattaaaggcgatgtgattgtcttaggaaaagttgcaattccaagtgtcaagatggccttgccagtcatgaaaggcgtctcagaggacacaatggctcaaggtggaggcacaatgaaacctgatcagcaaatgggtgcagttaacaattatgctttagcagggcattctttccaaaacatctttctgccacttgaaaatgtgcgcgtcagcgataaggtctacttaacggatatggaaaaagtctacacgtacaaagttgattacaaagcttcaatcagtccatacgacgtaaaagtcatcgatgatgtaccaggtcgtaaaatggtgacactgattacctgtgataaaacggtccgcagatggtgtattcaaggtgaactcgtgaagacccaaaaggcaacaaagaaaatgttagctgttttcgggaattaacccgggaaataaaagactgccagtgagttgaaatgctttaatagcagggatgcaacagatttgttgcttgtttttgtgggggttaattcgttaaattaggtttatagcggaggtggcaaaatgtcagttgggaatgctttaaaggaagctaggatgaatgttggggtgacgcaggaacaagttgcacagaatttgtttgttacacgtcaaacggtttctagatgggagcaagataaaacattaccaaacgttcatgttttaaaaacacttagtgtgctttatggtattccaattgatttcatgtctggcattattcattattgggcttgtgctttatccagtcgctaagaagatatcaggaatggttgttagctttggtaaacaatatgttaaatataatcaaaaggctctatacgcataaacataaaaacgtcatctattggatgacgttttttatttgaaaatcattggaatgaggccacctactaagagtggttggagataaatttgaagaaactaacgcgcctaaattattcaatgaattatcagcggatgaacaagtggtactcgttaattgggtgctaacaaccttgaaaccaattaaaacttttagcagtcagcggtcatcatacgagattaaacatatttttgaacgtacaccacttggcttttatgtattaaatggtgcaatgaaaggcgcgatgttaatcgctggttatcagattaagaacgaaaaagaaataaattggacgtttaatatatccgaacgtagcatttcgcgggcctatcaacttggataagaatttccgatttagggaattttatgtaaaaaaaagagatgtgcgttgagcgtgctatatgaacgcttggcccctaatatatagggggttggttaataacctgataaaacctaggttctaagtaaaggagtggttagcaccaatgattaattttactcccaaattgcaagaacagattagccacacgataaatcctattaaatcagtattttcattaatattcatattttatggacttaacttaaccggcggaagcagcggagaaaagctctttgggtgtttgatagccagtttgccggcgcggtaaattgtttagctttgactcaactgcttggatatcatgaggacccaaaatatccatggatagacccttgggtacatcgcggcggatcattcaactacggtaaaaatcgctgcgttgaaatagtgttcttttgcttgccctagagtatactctagggactattataaacaaaaagaagccataaacaaggatcatgctacttaacggcatagcatacatgactgattaaattaaccctcattagggaataggagcataacatcatgacaaaaaacgtattagttaccggcggcaacggttatctgggtctgcacattatcttacaacttttaaatcaaggttatcacgtccgtgccaccttacgccaactcgacaaacaaaccaccgtccgcaccgccctaaaagaaaatcaggcgcaacaccgcgaaaatttaagttttgtcgccgctgatctcactcaagatgctggctgggcgacagccatgcagaacatcgactacgtgctaagtgtagcatcacccgttttttccaatgacccgaacagcgacacaactgccaccgagggtattttacgcattttaaaggccgcccaacaggcccacgtcaagcgtgttgtcatgaccgccaactttggcgccatcggcttcagtaatcacgaccaaacgagcatcaccactgaagccgattggactgatcctaacgaaaaaggcttatcggcctatgaaaaattcaaactgatcgccgaacaggctgcctggcagtttattgaacaaagtcacggcagtttagaactgactacgatcaatccggtggcgatcatgggcccagcattagacgcccacgtttctggcagcttcgatctattgaaaaatttacttaacggtcgtcccaaaatgattcccaatatcccactcaatctgatcgatgtgcgcgatgttgctgacttacacattcgtgcgctgaccgcacctcacgctggcgggcaacgttttctggatagtgctgctggtcagatatcactaccagagatagcagcactgattcgccaaaaacgaccgcaaattgcccaaaacattcccactaaaacgatgccgaacttgcttttaagcagcgctgctttgttcaaccagaccgcccgcgaaggcaatttattagtgcacgtcaatcgtcagttgagtacccaaaaagcgcaagatatcctaaaatggcagccacattttgataatacgaccatcgtattagatagcattgacacgttaattcaatatggactactgccttaaattataaatttatttttatcacccccttgacaaacacttaaaatcgcgttaaattatagaaacattataaatcaatgagaaaattaaacgctgtgataagaaaagtataattgtattcaccagttaagcgagcgtcgtttggtgcaaggacgtcaaggtgcgacaattagaaaatcatctttgagcgttcattgggggctcccattatcgagctagggtatttcgtaccaattggtgcttgtacccgaagaggctgttttcgtgagaaaatggcaaatcaaggtggtaacacgtttattaacgtccttatctgaaagtaatttttcaggtttgggcgttttttgtttatcgtgatcattcccgcgcaggatgatcgccgccattactaaagtcgacttagcaatggcaacactcatgatttaaacgtggggcaacagacgcttagtctttgaaccacatttccacaacctacaaaatttaaggagtgctgcttatgttagaggaacgtaaactcactaaacgcgattatttcgtggttagttcaatgctttttggtctattctttggtgctggtaacttgatttttccattacatttaggccagctagcgggacagaattgggtgcctgccgcgcttggcttcttagtcactggtgtgttattgccattattatccgttttagcaatcagtatcactcgttccgaaggtgtctatgatgttgggcggcctttaggtcccgtattcgcgctcttattcatgatcttgatccacggcaccatcggcccactttttggtacaccacggacagccaccgtttcctacacggttggcttagcgccactagtaccaaagaatttccaaacagttggtttattagttttctccgctgttttcttcggcttagccctctttttctcattagaggaaaataaaatcgtcaacaatatcggtaagttattaaatccagttttcttagtcttattagctggcgttttcttcttagcttttagttcaccaatgggccacgccggtgttcaacacgccaccgctacttatacatcaggctctttcgtcaatggtttcttgcaaggttataacacgatggacgccttagctggcttagccttcggggtcaccgtagttaccgccgttcgcaccttaggcaaaaaacgcgctaacagtgtcgcgttggtcactgcccgtgccggcgtcttcgcaatggcaatgatcgccgtcatctacgttggtttgatcttcgttggcgcgatgtccttaggtaaactcaaagtttccgctaatggcggcatcgcttttgaccaaattgtcaatcattatatgggcgtcgctggtcaggccatcttagccactttgatcaccgtcacttgcttaaccacggcgatcggtttagttgcggcttttgcccaagactttcataaacattttcccaaagttagctatcgcacttggttagttctaactactctggcatcattcttgaccgctaatatcggtttaaatcaaatcatcgcttggtcaacgccaatgttgatgttcttatacccactatcaatggtcttgattttattgtcagtcgcttcaccactgttccacaaagacccagtcgtgtataaattcgttgttctctttaccgttgttcctgcttttttcgacatggtaactgcttttccagcggtcgtcagccaaagtagcttcggtaaagcgatgactggcttcgaacaggcatacttgccattcgccaactacggcttagcttggttagtccctgccttagtcggtaccgttttaggggttgccgtccacgtcttcaaacgtgttagcgcccgcaacaccgtttcacaaactaaataggtaagtcaaaaaaacgttcacttgcggtgaacgttttttggttctatactttttcctgttgatagcttacttaacatggtaatctattagcaggattttttagtgcaaaataaaaaaggcccataagcctcgcacctaaaaaatccacccactacagcatcatttttaaaggacgtgaaaacttatggaccctgtagataataatataaaatttgcgctcagtattaaagacccaaatgtagttttttacaaatataactatcaagtgattaaagctaagcgcgcaaaagtatatatagccacggttaagttcgaccagaaacattgcgctaactgtggcttttgcgagctaagtcataatggacactacgtatcacgcgtgacctatctaccggttcatctcgccatggatgaatttagaggaattggtggtcggctccatttcatctgtattaatggcgctggtgagcacgaaattcaacaaattctgccagaccgattcaagcaaagtattactgattattttaaacaatttccagcaagtgttcgagcacgtgtcaaaacagttaccgtagatctaaatagttactatcaaggtagattgcaaatttaatccgaatttttggacaaatttgtcagcataacctgatacggtgtttgccagtcgagtattttaagcggtcgctggttaatttggagtaacgtcgtcgttaaatcttgagcactaatgtgctcaaaacgagtccctttaggataaaaataacgtaaattccgattaaagcgttcattactaccacgttcagctggagtataagcatggcagtaataggtcttaataccatattgtgattcaagtgatactagcccactaaactcagtgccacggtccacagtaaagctgtgcaccggaccattaaaagtggttaggaacttagttagtgcttcattaacagtcgctgtcgtccgatcttttaaccggtatgcccaaaggaaccgtgatttgcgatcgattaaagttaataaaactgccttactatgcccacgaggaccaacgactgtatctagttcaaaatcgccgatgcgcttacgttgattaatcatcatgggacgctgttcaattgatcgccccaaagattgattatatttggatcgttggtcaacgttacgccgttggcgtacgccatgttcaggtagatcattcaaggagaaaccaattctcccctgatttagccaattataaatagatttagtagctagtttaaattcgtgagcaatcattcctggtgaccagcttagacgtaaatggttgagaattttttgctttaactcatcgctcagcttagttttccgaccacatcgtgatcgcttgtattcggcatctgtttgtgctaattcagcctgataaggttgacatcgagataattcataagaaattattgacggtgatcggttcagccgaacgcccatttggatattggacagccctagttcacaaaaggtttcgattttaattcgttcggaataggttatactagacaaaagatcagctcctaaaagatgggtttgtggtaaacaccattttaaaggaagctgatcttttttgtccgaacagcgttcggattaattttacaatctacctcaagacattgccaaggcaatgtttccgcaggcaaaaattgtgatcgaccgctttcacatcgttgcaatgatgactcgagcttttaatcaaactcgggtgcaaaccatgaaaaagtacaataaaagatcctatgaatatcgcacgttaaagttcgcctggcggctttatttgaagtatgccggaaatctagatgaggaacatgtcttttatgaccgacacctgcgaaaacaactcacacaactagaacatgtagaacaaggactgacaattaacgaagaacttaaagcatcgtacgagtcgatacaaagcatcatggaaaaccttaagaatcaagaccaagacaagcttgtggaagatctatatacaaatcaaaatataagtccctacatgaaagcagtgtttcaaacgttcaaaaagaacttagtggttgtactcaacgccagtgaatcggactatacgaatggcccagtcgaaggcatgaatcgaatgattaaacaaattcaacgcacagcatttggattccgtaattaccatcatatgatttcacgtattaagttacggcaaatgagaacaaaaccaatgaaaaaaacagagttgaaagtcgcatgactttcaactctgtaaaagctattcatcaacaggatttgacaaagagcctcattaatgagtgatgcttttctttttattaaatatgataacttatttttaatgatttatgctatatatcataaattaaaaatttagagaccattctcttgattaaatgtgtaaaacgatcacacatatactgatccgattagtcgagtaattcccaaatattgaaagaatattttgaatcaatataaaattagctggttttcaaaacctgtttaaaacttgctcactttattaacttcaatctagatggttcatgttgatcattgtgacaaagggttcctgaagttctcttattttttaacctatttttgatcatatgcttcttggaataattgaacgatttcttctttggttcctttacgaggatttgaaaaagcgttaccgtctttaagcgcattctcagccatcaattcaaagtcttccggtttagcaccaattgctttaatgcttcgagggatcttgacatcatcacacatttggcgcattgctttgatggataagtcggcagcatcccttgtggataatccgtccgtattttcacccataattttagctaattgtgcaaatctttccggtgcggcaacaatattatacttttcaacaattggaagtaacattgcacagcaaacaccgtgtggcgcatcatattgaccgcccaattgatgggccattgcatgaacatatcccaaatcagcattattaaaagccataccacccaacatttcagcttcaaccattttggtgcgggcttcaatgttgtgaccattagcaacagcttcacgaagactttcttcaaccaatttaattgcttgaatgcattgaccatccgtaatttcatttcggttggttgaaacataaggttcaattgcctgaacaaatgtatccatccctgttgcagccgtcaatgatgccggaacatccaacattaacattggatcattaaatgataccaatggaatatttcgccatgacacaacaacaaatttcaatttagttttttcatttgtgatcacacaatgacgggtcagctccgaaccggtcccggcggttgtattaacagccatcaatggtggcaatggattttgcagcgtttcgattccggcaagcttggtgatgtcatcaccgtttgtcaaaatgataccggtcccttttccggcatcatgtgaagaaccaccaccaacagtgataatactgtcacaatcattatctaaataaactttctttgcttcttgaatatttcgaatttttggattaggttcaacaccatcatagatggtataaggaacgccaactgcttcaagtgacgctaatgtttgagcaaccggtccattgtccattgaccgcaaaaacttgtcagtcacaatcaatggctttttcatatttaacatttttgcacgatcgccaattttcttgataacccctttaccaaagaagttgacactcggcattaagaaatcaaagttttctttcattgtaaaagcttcctcctagatggttatagtttgaatcaatttcataatagcattttcatacaataatacaaactatttcacaatctttttaatgttaatcctatctcaaggctattttaaagtatagggcccttagaaactgtccaatatctatatatttttgctataatctagtgacaactttttgagctttttattgaactagtcatagttagccagtagaattatccaaaaagcaaagttgttcaatctaactaatttgggtattggctaagggtatcaggaattaattcaatcttcttggcttatctacatcatctatgaccgtcacttttaattagaagtagttttttgttaacgttggaattataattgttctctgactcttttaaattataattaacatttgtaatttattacacaatacgcatttaaataaagatagtaacaggcctctcaatgatcattgagaggcctgtttgtgtcaaagtacctactgaagcagggatcgtatattaattaaagaaagtgcttttactaccacaactattagaaagtagctcaattggtttgataatcaacatggcgaatggcggccaatggaataaattgcgcttcatcaccaataatattatcttcttgataacctaagatatgagttgttatttccagtcggtggggatcctcaagctggcatacatttaattgaagggtgacgattaaatctcgttgataggctggatgtaagctgattcctgagacaacttttaagagagggtataatgaataaatcatctctcaaaaggaaggaatttttacatgccaactcgttacgacaaagaattcaaacaaaacattatcaacctatataagcaaggcgaatcagctgcccaactggccagagaatatggcattggctattcaacagttcataagtggatccagggccaggccaaaactcaatccggtaaatcgccagacgaaatcaaagcgatggaaaagcgactggcttcgctgtctgaggagaacgaaatcctaaaaaaagccatgggcttccttgcgcagaagtaaccaatatctttgattacattcaccaagaaagccatcaccaccaggtaaccaagatgtgccgaatcctcggtgtttccagagctcagtattatcgttatcgatcccccaaaccttcaaaacgccgggccgaagatgcgggcttgaaacaacggattctgcggatctttgcggaatttaagcagcgatacggtgttatgaagatccaccatgaattgaatctggaacttcaaccactgaagcttcggtgcagtccacgacggatttcccggctcatgaaggaactggatagccactccgttaccgtcaataagtggaaagcggcttcggcttccaaaaccaatgttgaacagcgtcccaacttgcttaagcaggatttctcgaccactggtttaaatcaaaaatggaccgctgatatgacctatattcaaacgaagcgtaatggctggtgttacttatcaaccatcatggacctgcactcacgacggattatcggctattcgttctcaaaaaagatggctactgatttagtcttaaagacccttgaaagcgcggttaaaaatcgaaccattactggggacctgattatccatacggatttaggatcacagtataccagcgatgattacaatcaacgtttaactgagctacatatccgccactcatacagccgtaagggttatccgtatgataatgcgccaatggaatcctttcacgctttcctcaaaaaggaatgtgtttatccagtgccggtctttgaagattatgaaactgccgctgccgtcctttttgaatatgtgcatgctttctacaataggaagagaattcatagttcactgggctaccagacccccttacaagttgaaattgcaacacttacgagccaaatggccgcctgatttaatgctttccagggttcaaataagttattaatcgcgattaatgatttatttgagctgtggaaggtaaacgcggttctgaatgtctcttaaaatctgtctcaaatattgacttcaatccaatgcgttatatgcgtgtgagggtggggtagtacggctgaaaattaagccctaattaattttagatgtggccaattttggacatatgtttccagtgggatgcgcttagcctcctcatggatcaacttagcggaaaagtccgttcggtattaacttagaatatagattggctcaagtttgagcaagtgtttttggatagaaacataatggcgtaacgaaacgttacccctaaatataatctagattaaaaaatacaaccaagccaaaattgggctcgtttgaaacatatacccaaaactggggacatccccttatctaatgaatacagtcgcgatttacgacggaaactaatgctagtagttgctatatgccccttgacggtctatgtttaatctaggtcgttggtaatgaagttagtccaaattaaaaaacggccactaatctgaccgcctgcagtaagttatgtatatgccccgtgcgtgatttttgttgaatacgtgaatacgggtttgaatacggtttgtcgtattcactgtgaataataatctgctaagaagaaataaaaaagccgttatatcaatgcctaagcacttctataacgacttatcatgtatacttgatgggtggtcaggggatcgaaccctggacccacggattaagagtccgttgctctgccagctgagctaaccacccatatgatgtctcgccttacgacttaaatatcatagcatattaaacaaacttttgtaaacagttatttgtatttttttgaataaagttactgagcgcgtaagaattaatcgttatagggattaacaatgccgttaatccagttggtaggaattgacctaattttgaattgccttctgaaaatgagtataatagaaggcaaagcatccacattcaaggaggatccgcacatggctaaaaaaatactagtcgttgatgatgaaaaaccgatctctgacattgttaaatttaatctaaccaaagagggttacgaagtctacacggcttatgatggtgaagaagccttacaacaagttgaagaggctgtcccagatttaattctattagatctgatgttaccgaagattgatgggctagaagtagcccgccaagtgcgtaaatcgcatgatatgccaattattatggtgacggctaaagattctgaaatcgataaagtgattggcctcgaactcggtgccgatgattatgtgacgaaaccattctcaaatcgagaattagtggcgcgagttaaggctaacctacgccggcaaggtacaacgagtcaatcagataaagaagcgaatgaagaaaatcacgagattaacatcggggatttaacgatccatcctgatgcttatattgtgtcaaaacggggcgacaagattgaattaacgcatcgtgaatttgaattgttacattatttagccaagcatatcggccaagtgatgacccgtgaacacttgttacaaacggtttggggatatgattacttcggtgatgtccggacagtcgatgtgacggtccgccgtttacgtgaaaaaattgaagacaaccccagccacccagaatggttagtgacacgccggggtgttggttactacttaagaaatcctgagcaggagtaaatttgccgcatgaataagaaaattcggttgctacaatcgattcattttaaaattgccattgtgttcgtattgttgctgctggtaacgttggaagttatcggcgcttcttttgtgaagcaactggaatatcagaatgtgcgtgattttaagcaatccttacaagtgacaccctatattcaaaaccaactcagtaatgagttactgaataatagtggtaatgcgaacaagaatattaaagagattattggcgatatgggcaattctgccgaaattcaggttgtcgataataagggcaccattcgaggtgtcacgaacttgaataatcaaagcaccgttggtcaaaagacgcgtaacccacgggtgaaacaggttatttactctgggcataccgaacaagaagtggcatacaatgagagtctagggagctattatacagcgatccaaccgttgacgaacccaagtggggatagtaatgccgttgtgggcgccgtttatattcgggctagtatggaagatgtttacaagaggatttcgtcgattaccgtcattttcttaacctcgtctttagtcgctggtttattagggatggcattatcgattgttatttcccgggcaattacccgaccaattgatgaaatgaagaaacaagcgattcaaatggcgcgaggggattactctggtcaagttaagatttatggtcaagatgaactggggcaactcgcgattgcggtcaataacttatcagtccgggttgaagaggcgcaagaagcgtcagagtcggaacgacggcgacttgatagtgtgctcagtcatatgactgatggggtcattgcgactgatcgacgaggcaatatcacgattatcaatgaaactggccaagattttttaaatgtgacacgcgatgagttactgggccagtcattgcttaaagttttacgaatcagtgatgaatattctttgcgcgatctattagaaacgcaacaggaaatggtcttggatttctcagaacaacaagatcacgacttaatcttgcatgttgatttttcattaattcaaaaagaaaccggctatatcaccggtttagtttgtgtgctccacgatgtcaccgaacaacaaaagaatgaacaagaacagcgcgaattcgtttcgaatgtgtctcacgaattgcggacgccattaacaagcgtgcggagctatattgaagcgctgaatgatggcgcatggcaagatccagagctagcgcccaatttcttaaaggtgacccaagaagaaactgatcggatgattcgaatgattaacgatctattgagtttgtcacgaatggatcaaggaacggcaaagatgaatctcgaatatgttaatttaaacgagttctttgggtatgcactggatcggtttgatatgatgatcaagcgggatcaagagcacaaagatgatttgcctaaactgacaaccagcacgggcaaattgccaacagatgatccgaataagaagtacagtattacacgagacttcactaagcgggatttatgggttgaaattgataccgataaatttatgcaggtgatcgataatatcatgaataatgcgattaaatattcaccagatggtggcgtgattacgtgtcgcttattggaaacacatcgtcacgtgattttaagcatctctgatcaaggattagggattccacggaaagaccttggtaagatctttgatcgcttctaccgggttgataaggcccgttctcgtaaacaaggcgggactggtttaggcttggcaatttctaaagaagtgatcgaagcgcatcgtgggcgtgtttgggttgatagccaagaaggtaaaggctcgacattctacatttcgttgccatatgaaccaattgattctgatggaggtgattgggatgcgatttaataactttttaatgcgcgttatactgattgctgccattatcgtcagtatcgggctatcatggctaatctggaccagtaacgcgcattatgagcgccaaacggacagtcaaaccaccactaagtcaataagtcgtaagacagaacgaaaaatcggtgatatcttcttgccgacgcaactattgtggcggacagacaatcagagtcagttgatttataactcaaaagagagtttgattccacagtttaaagcgactttaaagcttgccaagtcggcacagtttaagcaagttaagctaagcgaagacgattattaccaggcaattagtgatgatcatacattgacccttttatatcctgataatatttcgtacgctatttttaaaaaggtcttcagttatcagaataataatttaggtcaaaacgtgacattcaatcggattcgaatcacgttgagcacacagcctaagttgtggttgatgaatgatcaaagtcatcaagtgtaccaaacgacactcaatgttttttcacaagctcgtgtgaaaaaggtgcttaaaaatgccgatgtgcatttgaaagtgaccgaaaaaatgttgaatcacaagccattactctatgtggcagcggatcaaacgttattgccttatagttatttagttaatcaacaacccgaaaattattacatcacaacgctgttgaatcaacaaaatatggataatattgatacgaaagaacaaggcaatagtgcgatttatacggatgggacggacagcaatttgtataaacgcctaacgatcaaccacgataccggtgaaatttcgtttgtgaagtatgaaaatgagaaatcaccaagcacattaacaaagagttttgaagccagttttgatgcgcttttaaagacaggtaatgccctttcagggatgcgtttctatagttatgataaagcaacgaattcgactgcttatcggacctacgttgaaggattcccagtcttttatcagactaactttgggagcgtgaaagtacaattcttaccaactggtcaaaagattgatttttcaaattatagtttgcaagtacccgttcctgctgaagacaagcaagtcacattgccaagtaccgagtctgttttgaatcaattgacaagtaatggtttcttgctagaaaatgtggaaaacgtgcaagtcggttatgaatggaccaaagaaaccagtaacgaacaagtgattgatttaaatccaacctactttgtacagtataaaggggtttggcgtagcttatccgcattgatggcgcaaaaagctgaattaaccgaagggagttagatgaatggattttcgcagaattgaaatgatttttatcgccatttttattgcgctggatatctatctatttgcctcgctgaaaggcagtcagacaataacgtcgacggcgattactagtggttcacagactagccagattatgaaggatttaaaagacgatcaaatttcagtgaagaaactctccaagcgccgaatggatggttattatttagccagccgacaaaaagatcagacattattagaaacggcgagtgccaaactaaccggtcaaactgtttcgtttgataaagcgcgcatgacactgacgagtgaattggataaaccactgacttacaaaaaagagaaccaacgcttagccgtggcggcctttatgaaggaaccagacaacgtgattcaagcggaggactaccgctattcacacgcattatcgagtgatcaacaagtcgtatatgtgcaaaaagtcccaggcgggcagatcatggatgaacatggtcagttgatttttacattagaagacgggcagattagtcattacacgcaaacttacacgaataagattcaagttttgcgtgaaaaagaaagtacgaaggtgactgctcaagacgcggtcattgatttatatacagataatgagattccgaataactcacgcattatgtgggtgaaactcggatacagtgctttgttggacgccaatagtagtacggtgtacgtgccagcttggcaagtggccattgagaataagaattctaagagtgtcgtcgttaagcggattaacgcctttaccggtgcgctgatgaagaaccgtagtgaaatttagttgttttagaaagagaccaaggggatagagcaaaacatggtagaaaaagacgcaatgcaagtcagcgtgctcgcaagcagtagttctggcaacacaacgtatattgaaacacctaatcataaagtgttagtcgatgcaggaatgagtgggaaacgtgtgcaagatttaatgcatagtattggccgcgatcttaaagatgtggacagtttattagtgacccatgagcatcgcgaccatagtagtggtgtcggtgttttggcccggcgatacggaatagacgtgtacgcaaatcaaccaacatgggatgcgatggcttcgattattggtgaagtgcctgctgaacacaagcacatttttgaaatgggtagtaccttgtcagttggtgatttagatattgaaagttatggggtgtcacatgatgcggctgctgcccaattctaccaattccatcataataaccgtgcctttgcaatcctgaccgatacgggttatgtctctgatcaagtgcgtgggacaattgaaaatgcggatgcttatttagtggaatgcaaccacgatttagagatgcttcggatgggaaagtatccttggtcattgaaacaacggattctcagtgataccggccatttatcgaatgaagatggggcatccgctttgatgtcgtttatggggaaccagactaaacgcgttttcctaggccacttgagtcaagaaaataacatgaaggaactggcccatttgacggttgcgtcgatcttaaaggaacatgattatggggtgggaacagactttgaaattctagatactgatccggcagttgctgatccattgtttgccgtgtaattagactgaatagaagacattttagttgtttttgcgaaataagttcgctaaaatgcggattagaaaaacaatttaatattcgtaacttgttcataattttttcaaatttacattctatgatagagataatcaataaacagaatttattagaaagtttgggtgaattagtatgaatcagaattcaggattaatgaaaacggctgttgttgccgttatcgcagcactaatcggtggtggcgttgctggttatgccggttcaaagatgggaagtaacactgtctcaagcactgcccaagtaccaactaaagcaggtgccactaaaattagtaatatcaaagtcaactcatcttcacaaacaacaactgcctttaataaggtcaacaaagcggttgtgtcagttgttaacttgcaaaaacaacaagataattcaggcgatttgagtgcgctctttggcgcggatagtaccaataaaaaaagtagtagtagtgagcttgaagaatcgagtgaaggctcaggtttaatctacgaaaagaaagatggtaaagcctacattgtcacgaacaatcacgttgtttctggctcagataagttggaagtcatccttagtgatggcacaaaaattgatgctagcttagtcggaacggatgccgtttctgatttagccgttttaaagattgatagtgccaaagtgacgaagaccgcaacgtttggtgattctgacagcattaaacctggtgaatcagtgctcgcgattggttcgcctttaggctcagaatatgctacttctgttacccaagggattatttcagcaaagaaacggacgattgatgtgacggatgaaacaaccggtcaagcgactggccaagcaaccgttattcaaactgatacagcgattaaccctgggaattcaggtggtccgctagttaaccttgcaggacaagtcatcgggatcaattcaatgaagttagcttctaacgggagcacaacggttgaagggatgggctttgccattccaagtaacgaagtggtcaaaattattaaccaattggttgcaaatgggaaagttgttcgaccagcgcttgggattagcgtcatcgatttgacgaatgtttcatcaacgcaacaatcatcagtcttgaaattaccaacctctgtgaagagtggggtagttgttgcatcagtcaatgccaactcagttgctaagaaggcagggattagtaaatacgacgtcattgttggtttaggtggcaaggatgtcacaagtgttgctgatttacacacgacactttacagttacgatatgaatagtacggttgaaattcagtattatcataatggtgaattgaagaaatcaacagtgaagttgactgaagcagcatcaacagatagtacaacggcagcaaaataaattaaagccgccagcatcaattagatgttgacggcttttttattttggttaaattcagactaaagtggcaggaatgttaagttttaaaaatgtcaatgtggatagtaatctgggaagaaatccgagcgtctgtggataagtctgtggattgtgggtataacacggttaaaaggtctttttagttatccacaaaaaaattaacaggcggtggataacttttttaaaattattataacatcagaacaacgctgatataaaaggatttgtaaccggataattcgaagaacgaacaatcaaaaaagggtggataacttttttattaaatttaacgaaaaaatttaggtgtcggttatttggtatcaagaaaaattcgagataccatatttgggacgaacacctgtgcatatgtggacaacttttgtggataagcagtacttttcggtgaattactgtgaatggctttttttctgcattgttttcccataaaatgtaagtaacagtaggaggctatttatgaacattaaagtaatcacagttggtaaattaaaggaaaagtatttaaaagcggggatcgcggaatatgcgaaacggctcagtaagttctgtaagttcgaaatgattgaagtcgcggatgaaaaagcgccggaatcattgagtaacgcggaaatgaccaatgtcaaagacaaagaaggcgaacgaattcttaataagattaaggataaggagcacgtgattgttttggcaattcaaggcaagcaacgcgcttcagaagaatttgcacaagaaattcaagatttagcaacctatggcaaatcagatatcacgtttgtcatcggtgggtcgcttggaacgagcgatgccgttaataaacgcgccaacgatgcgctatcatttggcaaactcacgttaccgcaccaattgatgcgtttagtattgaccgaacagatttaccgggcgtttatgattaatcaaggaagtccgtatcacaaatagagttaggcataaaaggcctcattgttgaatgaggctttttttaatgcaacaagagagagcggattgcaacaaaacaaatagtcatcgaattaagcgagatcttctgctatctttaggtttgtagaggaggcgagttaatgaaaattatatttaattgggattcaaagtgtgcacaagatacgattgtcattcacagtcaaccacagaatcaagcaacggttgaatctgcttttaagaagctaacctttgatcaatcgattcaggtgcgagatgcgcgaacagatcgattacaaaacatatcattaacggcaattgaaagttttacggcctttggacatttggtgaaggtggcgacaatcgatggcaatagctattactaccctagtaatttaaaataattagccccgttttcgcagaacggttttctgagaattaataacacaacgattttaaatctgcagcaagttgccaattttgcggtgggttcaaatgcgcgattggtggtctatacgcaatctggaagacagtatattgttagtcggtattatgccaagcaaataaaggagtggttaaaatgatgaagcaaatccgcaaagactttaatcaagtggcattaatggcgattatgtggttcactgttgtcacaacgctaacgcggggcgaagcgctggctgcttggcgattagttagcctaggcgtgttgattggcgttgtgtttggcgtcatttattcatacttatggcgctattcgacgttcggtgcgccgtggaatgttttgattagtactattagtaatattgggtttcaaatactcgctttgaggctctattcgacaacgttatttgatgttgtttcaccgtatttattagggacgtcgttattaacattcgtaatgcacgtgattattttttattactacacgcgctatcaaaataagcgcttagtgaacgaattgaatcaaaatagaaaataaacttgttgtcccctttgcaggttgtttatactagaggaactaggactatttgttaagtagaaatgaggggaatcagatgacgaagagacaacggaaacgactttggctagcaagcggtgtgattttactaggattagtgattcttctaattggatggcaacaccagaccgccgtttttgctttcttggatcaatggcaaaattaccgccaatatgtgcttgagattcgtcatctggggccgtatgctttcttggtgtttggtctgttaatgattggggtcaccttaattccgggtgcgccaacatcagcggtggcattgattattggcgcgtgtttgggtcattggggtggtttcgtggtcaatgcgattggcttgacgatcgggaacttgttgcaagtccaattatttgcccgtgtcagaaatcatcgcagtaaaaagccggattcgcgtgtttaccgcgcattaattaagatgcaacatccagcgcttggtgtattaattggctatgcagtgccgatgattcctacggcctttgtcaacttggcggctggagacacccacctcaccccccgagcacagggcctggcgtgctttgggggttcaacgattgtcgcgtttatctacgcctttgcgggcgatttgcttattttgaagcaagattggaagagtttattgattctcttgatagtcgctgttgtgattggtttaacggaatatggtatccggatgcggcggagtgataaagctcgccaaaaagtcgaacagtttgacgcattaaattaaagttagaggacgtcctgaggagggcgtcttttttatttgtgtgaaaatgtatatgataaggtatgatattaaaagtgattggtatactgaagtaagctcgttaaacgaaataacttatactataataaatataaaagaaaaatacatggagcacgcaatcgtgagtaagaaaaatacacttttggtaacattagcattattattatccaacacaatggcgggactcgatgggacaattatcaacacggctttgcccgctattatcagtgatttacacgggattcaatatatgggctggattgtggcggttttccttttggggatggcggttgcgacccccttatggagtaaattaggcgaacggattggaaatcgtggggcttaccagctggcgacattattatttgcggttggttcgatttttcaggcagtttcggggaatatcgtcttctttctgattgcacgaacggtgatgggcatcggtgctggcgggatgaatactttaccattcattatctatgccgacttatacaaaaatttacgcaaacgcgcgcaggtgattggttatgcgactgcgagttatagtgcggcttcaattgtaggtcccctaattggtggctggattgtcgatacgtttagttggcattgggtcttttatatcaatgtaccaattgccctagtatcaattgtttgtgttcgttatttctttaaagaaacgcttaaatcacatcaaaccggaaacgtcgattatttaggtgctgggattatgattaccagtttggtgactttattgacggggattcaaatgattgggacgggttcgctagcactcgttttaggattggtatttgctggtttagctttattagttgtcttgtttagagttgaagaccgggcagttgatccgattgtgccgaaccgcttatttaaaaatccgcaattggtgaccgactttattttatttgttgttttatggggcgcatttatcgcgtttaatatctatattccaatgtgggcgcaaggtttacttggattaagtgcgctactcggtggaatgacgcagattccaggtgcggtgaccaacttaattggctcattggcgggtcctgcaattcagcctaaattgggtaaacaccgcgttgtgacattgggaacagttgcgtttttaattgcgtttagcggtatgttgatgatgggcgaccaagcatcgttttggttcttactgttgatgggggcctttgaaggtttcgggctcgggatgagttttaacgtcctacaaatcagtgttcaagaagatgccgaagaacgtgatgttcccattgcgacgtcgtttgcctatctcttgcgaattctcagtcaaacattcatgtcatcgatttacggtgtgattttaaaccatgccttaacacgcggcattgccgaatcgcacggtcaaattacgatggcgatgatgaataagttaagcaatctccaacgcgttcacgaattaccagcgcacttattaccagcgatgcgcgcgattatgtatcaaggcttgcataacatcatgctgattgcgacagtcctattggtgattgtgctcgcgtttaatatctggttacagatgaaggcgaaaaaagaaaattaaaaaaagtgttgaaggtcgtgagtaagttggccctcaacactttttttaataataatattttaaatcactcgccgggcttgggtagttatagatggtatcggtgagttccgttgcggttgtctgatgtttaatcaggttggtaaagtaattaatgagttcttcagcaattgtggtgtaagccgcagcaccgacgagttggttagtttgattgtcaaaaatggtgatgaccattgcgtcggattcttgaatacgattgaaggtataccaatttgtgacggtttgttgattaatgcggtattgactaggagcagcttgtgcagttgcaacagaaacgcctacttgtgatatttgtgggcttgcatataccgtatgtggaatgagtgggtaagtaatgggtgctgtctttttagcgagtagttggttggcgacatagcggccttcaaaaccagcaactggtgttaatttgggttggacacgatctacgacgtcaccaatggcgaagacgcggggattactactcattaaatggtcattgacttgaatgccatgctggttcgctgttaccccagctttttccaatgccagttggtcgatattgggtttgcggcccattgcggcaaaagcggcgtcgactgtcagtttaaaattagcttgattactgagagttagctgattgctggtttgcgtaattgttgtgacgtcagtgtcaaaatgaaagtgaatgccttttccctgaagactggtgacgagtttatgtgttaaaactttaggaaagtcgcgtaaaatacgctcgttatgttgaataatatggacttctgcaccagcagtaactgcaatatttgccagttcaatggcgatatacccaccaccaataaaggcaaccttttctggtaaacgatcgaggtctaaaaattcattactggtttgtagtaaatcgtgaccctcgattgtagggagcgttggtgtttgaccggtcgcaatgatgaaatggtcggcagtgtaagtgtcaccattaatctgcaaggtttgagtatcactgaagtgggcggtgcccgtgacggtttggatgccggcatgttgtagaccgttgagggtaccagttgggatttgttgcgtataagatcgcttaaaggccatcagttcagaccagttaatagcgctagttccgactaagccatttgtttggagcgcttgttgattgtcgagtgcttcgacagctgaataaagcatttttttaggatcacagccacggttggggcaagtgccgccccataaatcattttcaacgactaagacggactgttgttcagcgagactgtaagccgccgctaagccgccaggaccgccaccaataatgattgtatcaaagtgtgtttgcatattaagacctcctcagatttcaattcgggttcatcttagcatagtcacaaagcgaatcaaaaaaattggattgggtgtttaagcacgtcaattggtgggctgattgctaagtggtacaataagttaacaaatcgttaaccggaaaaaggagtagcacatgattgaatttgaaggtgtcactaagcaatatgaacaaagcttagcattagatggcttgacgttaaccattccagacaatggtctatttgttttggtcggaccgagtggtagcggaaagacaacaacggttaaaatgattaatcggttaattgaaccaacgagtggcacaattaagattgacggccaacccatcaatcaaatggatctccaaacgttacggctcaatattggttacgttctacaaaacattgcgttgtttccacatctcacaattgaggaaaatattaccattcaattagaggtattgaaatggaccaaagctgatcgtcaaaaacgggcacgcgaacttttggaaatggtccatttagatccggatcagtatgctagccgttatccaagcgaattatcagggggacagcagcagcggattgggattattcgtgcgttagcaactagtcctaaggtgattttgatggatgaaccctttagtgcgcttgatccggtgacccgtacacaattacaagatctcgttttgagtttacaaaagcagctgcataatacaattgtatttgtgacccacgatatgaaagaagcgttgcgcttgggcgatgaaattgcggtaatgcgccaaggcagtattcagcaagtcgggacagcaaaagcgatttttaatcaaccaaaaaatgaatttgtccgcgaattttttgacattgaacgccaacaagcaacgttgacagttcaagatttattggcggccgatttaggaactgttgttaataatcagccgacaacgattacgtccagtgcaacattagctgaattagcgcaacaattagtagaccatccagatgggggcgtagttgccactgatggtcaagaacaacggcaattgacgatgaccgatttaacaacgctcattgcgaaacgggggctataacgatgatgcaacagattgaacaaattttaacgacccaatccggtgagttgctacaagcacttgggcaacatttggagatttcgttattggcgttattaattgcggcggctatcgggattccgttggcgattgttttaacagctcatcagaaattagctgaagcaatgctgcaagtcacgagtgtcttacagacaattccgtctttggcgctcttaggattattgatcccgcttgtcggaattgggacgattccggctgtgattacgttagtactttatgccttaatgccgatttttcaaaatacatacactggtttgatcggaattgatccagcattaaaagaggcagaaatagccttcgggttgccgcgcgctaaacggctactacggattgaactgccacttgcgatgccgttgattatctcgggtttgcggattgcactcgtgatgattatcgggacagctaccttggcggccttgattggcgcgggcggcctcgggacgtttattcttgttgggattcagtcaaataataatgcgctattattggttggggcgacactttcagcggttttagcgttagtggtcagtgcattaattcgctggttagggacattatcctttaaaaaaatcacagtcagtttagccatttttgttggccttttcggtgtgatcgaaggaatgacacggtttcaagcaccgcagaccaccatcacgattgctgggaaattgggtagtgaacccgaaatcttgatgaatatgtatcgtgatctaattttagaagaccagcctaactacaaagtaacggttaaacctaatttcggtgggaccacattcttatttaacgccttgaaggctgataagattgatatttatcctgaattcacaggaacggttttacagacgttggtgaagtcgccaactaagacaaaccagaatccaactaaaacgtatcaacttgcaaaaacatcgctacaagaacagttcaatatggcgtacttaccgccaatgcgctatcaaaacggttatgacttggcggttactgcggcctttgccaagaaatataatgtcaaaacaatttcggatttagccgctttgaatcaaccatttacggccggttttgatcctgatttttatcaccaaaaagatgggtatcaagggttaaaggacacctatcaattaaatttaaatgctaaaattatggagccaagtattcgctataaagcgattgcggacggcaaggtcgatgtggtcgatggttatacaaccgatgcggaagtcgcacggtacaaactagttgttttagaagatgatcgtcacttcttcccgccttatcaaggggcaccgattatgaaagccggctttgccaaggcgcatccggaagtcgtcaaagcattgaatcgcttggcaggtcagattactgagagccaaatgcaagagatgaactaccaagtacaggtcaaacaccgcaaagcacgcgatgtggcccatgattacttggttaaacagaaattaatcaggcactaacgaacaatgcttgaccttcacgtcacgtcaggccttatagtgggttttgaaggagggaaggcaaatggattatcagattaaaactttcgctgaattgaccggggtttctgagcgtacgctacgttattatcacgagcgcggtttactggtgccaacggttgctagtaatggttatcgaacgtattcgagccaggatgcagatcgactgcagttaatcttaatgtaccgtcaactacagtttagtctggctgagattcagcagctgttggcgttaccaccggccgagcgtctggaacgcttagcaaatcagcgggaacaactggttaaacaacaagctgcgctaacggcaacgttagcacagctagatgcgacccttcaaaatcaaaccggaggaattcaaatgacagatcaaactaaattcaaacagtttaaacaacaggcagtggctgaaaatgagcaacgctacgggcaagaagtgacgactaactatgggaaacaagccaagcaagaagccaatctgcactttttagggctaagtgaggcccaatatgcaacgatgcaggcggctgaagaccgattgaagacggcattacaaacttacttggaccagccgcaattgccatcagaagcggcgcaaacagcctttgaagcccatcaaacgtggttacaaacagcgactccccggtatagtctagcaatgcaccgcggtttagcagtcatgtatgtagcagatgaacgatttacagcatactacactaagttaattggagatcaacgcgcagcggaggctttacaaacgattattgaatattatgcaattgaagcctaaaaaaggactgacatttgtcagtcctttttgattatttagcgggaattttccgtaatacccgtgctggattaccaactaaaattacgttacccggataggatttggtcacgacactgccggcaccaacgacaacgttattgccgagcgtgattcctggcagaattgtgacatttgcaccgagccagacgtgattgccgatagtaatgggactagaaatttctttttttgtcgcacgttctaaggggtcaattgggtggtaaggggttaagagtgatactcctgggccaaatttacagtagtcaccaatggtgactggtgcttcgtcacaaataacgacgttacgattggcgtaaaaatgatcgccaatcgtaatgttttcaccgaagctaaattcaaaaccggtttcgatgaaaaaatcgctaccggtatgaccgagtaatttttggatagtggccatccgtgcatcgttatctaagatttggctggccttttgtaaggcaaggcgggttgcatcccgtttttgaatagtgaccgctgaatcaaagtaccattccccattggtcatcgccctaaaagcgtcgtcagtttcgtgcatattataagtcgcctccgttaattgtactctctaacgatagaacaatttatcctggagtgcaaattgggttagtgattgcagttcggaactatctatgggatgctaatcatagataatttttggagggcaatacgatggataccaagcaaaagctagcagataccttaaaagaattgatgaaaacaactccggtcgatcacattacggtcaatcaattgacgagcagtgctgacgttgcgcgcaatacgttttattaccatttcgccgatattaatgagttggttgcttggatttataatcgtgaaattgttacgcaactggcagtgtatcaacgtgaacgggattggggcgtcggtctagatgtcttggtaacttatattgaaaataatcggcatttctgtttaaatacgtttcattcacttaatcgagatttactaagtcgctttttgtatcgagtcgcttttagcatggttgcaggggttgttcaagatttaaaggtggattgtccagcgactttccgagatgaaattgccaatttttatggttgggcattggcgacacagattacgcaatggcttgtaacaaatctacaagaatctaaagaggaattttatcagcgcatgcatcgcatgttaaattgtactgtgaaccatgttttacaaaataatcattagatttggacatttatcctgaattgaccatacagaaaccgccagcttgcagttaaagtaagaatgtaattagcaattatttctttggaggtgactgatatgtttttatttcaaaatatttcaggaatggattggctagtttggggactagtggttattgcattaatggttttaaatgaagcagctcgggctaacaagtggattggattaattctctttgttgggttgccagtcgttttaacgctctttgtttggccaacgacggctggtcctggtagcagtaccgggacttggttccactgggttaaagtgtactcagcattagcaggttgtttagggtttatggcgctgcgctttatccctaagttacaacacaacaagtgggcattgattttcccacccgcaattttagcgtttaatattatggaagctgtgattcgtgattttcaagtttcacacctacatggcttagtcgacggtgtgatcatgaatggtggcgcgtggaatatcatgaacgggattgccggaattattaacatcatcacaatctcaggctggttcggcattattatcagtcatgacaaacaaaaagacatgatctggcccgatcaaatctggccttggattatcgcctatgatgtttggaacttcgcctatgtttacaattgtgttggtgatcactcattctatgcgggcgctgcattattaatttcatgtacattagcagcattcctggttaaaaaagggagctggctccaagcacgtgcgcaaacattggctttttggatgatgtttacaatgagttatcccgcttttgtaacggattcacaattttcagtgcaaggtacgcacagtagtgctgctttgatgacaatcagtggtttagcactggtcattaatgtggcagtcttaattctccacatttatcgtgtcatgaagtataaacgcaacatcctaactgacgaagtctatgctggtacaaaggcctatgaccaagtcgtggcagaaaacacgtcggaaggtaaataaaacgaggctcaatgaaggcgcagttcaatttgaactgcgcctttttttgcattttatagtatgatagatcctataaaggtgggatcaacatgacaactttttattttgtacggcatggtgaaacgatggttaatcgagcacagtgtttcaatggtggtgggacgaattcaacattaactgaggcggggcaagcggctgctaaacgactaggtagtttattagcggaccagtcttttgatgcgttactgacgtcaccattaacacgtgccgttgaaacaatggatgcgatagtgtcgcagactaatcaatcacaaccggcaatcatggtcgtggatgatttaaaagaaatggcacttggtgattgggaaggccaacctggtgctagtttgacgaaccatccacaatatgaaaattacttccatcatccagagttgtttgatgccaaacagattcacgcggagtcctaccaggcggtcttagaacgtgggatgctcgcgattaagactgctcaaacgacgtatcctgatggtgatgtattagttgttgcgcatgggattattttattgtttgttatcaacacactactagggattccgtttgaggaaattcgatcacaaaaaatggttgctaatgcaagtctatccgtactaaaaagtaacggcacgcagtttgaaaaggttgtgtggaacaaaacggtttaggaagggtttttggatgacgataattatgattcttttgatcgttgcgttgggcgcttttaccagaacggtttttgggtttggtgaggcattagtaacgatgccattattggccctagtagcgattgatttaaaagtgtcaacggctttgattggcgcgctgggactaattgtggcgattccggcagtgattcgtcaccgccaacagattgatatagcggttgtcaggcgactagtgattggttcattattgggtgtgccagtcgggatagcgctgatgacgtatgtgccaacgacgattgtgttgagaacgttagctgggtttttaatcctttatggcagctataatcgctatcagttacaccgatatcacgtgcagcagcaacatttacagtcacatcattgggattatttagctgggataatatcaggcgtgatgggcagtgcctacaatagtcatggtgtgccagtggtgatttatgggacattaaaaaaatggccagtagcatcgttaaggggcattttataggctcattttatttgtgttgggacaatcgtggtaatcagtcatattttagcgggcttttggaccatccaagtattgcaactattgggacttagcttaccattattgttagttgtgattccgttgggcaattgggtgagcactcgaattgatagtcgaacgatggtgcggtatatttatgacttattaatcgtttttggttgtttgttgctgtataaaacgttgtaaaaggtcattaataggtggttggtttattaaatgatgtaaagctgatggacaacgccgcagatagtatactaaaatgatagtgtataaagtttaaatactaaggggcggaaattaatgagtaaagtattagttgttaaggcgcatccacttgctacagaacagtcacggacgttaacgattttggcgcagttcatgcaagtttatcaaaaacaaaatccagctgatgaaatcagttggttggacttgtaccaatctgacttaccagaaattgatcaagaactaatgacggcatgggcggcgttaaaagaagggcaagctatggccaccttaagcgctagttagcaagagaaggtcgctcggtttaatcgctataccgaccagttcttagcaaccgataagtttgtgattgctaatccgctttggaatttaaatgtaccgacgaaacttaaagcgtggattgacacagtgatggtggctggaaaaacatttagacatactgaaacagctccgcgaccttagcaactgggaaaaaagcagttcatattcagtcagccggaagcgtttatgctggccaagattttgcaacacaatacgttaaaacaattcttggctttgccggtgttgacgaagtcattaaaattagtatcgaaggaattgatcattcgccagaaaaagctaacgtgattatgcaggaagctattgaaacagctaaacaaacggcacaagttttttagaggcgatatagtggagggataaccatggattttgaattaccgatatatccagaaaatcaggcggcaatgaagaaatacatgcagagtcaatttgaatttaacggtgttaaagcaccggaccaacatttaattgaacgcgaattgtggcagtctgtgaaacaattgccaccagcagaaataatgcagttcattgagaccttatatgctcgaccaacgcgtgagtatcaatatgttgccatcgagatggcattgcgttcagtacgttggtgggaaccggctgatatggaacatttattaacgttggtgttggaaaaagtttggtgggacagcatcgatgtttggcgaaaagtatttggagagtacatcagactgcatcttgaacagtttgattgggttgcacagcattttataggtgctgagaatttctggctgcgccggattgcgattacgctacaactcagtttttacgaaaaaacgaatgtggcgtttttggaagaagccattctggcagatattgacacagatgagttctttatccaaaaagcaattggctgggctttacgtaactatagtaaggaaaaccctgagtgggtgatgacgtttgttgaagaacacgaactaacaatcttcgcccaacgtgaagccttaaagaaaatcaaacaaaacaaaatgtttcacaggaaacatacaaaaagcagcacccatgataactaatcaagggtactgctttttaataacttaatttaagagggtaacagctaataacaagtattaatggtactaggataagctaatttattatttatctaaacccgccagaactttagccggaatttgattcttggacacagtattaggcccttttaagacgcgttttgaattaaattcaactttgacatagctgttgggagtgagtggcgttggattttcgccagtaacttcgacagggaccacttggtggctaccatcttctttcaccacatttagttggtagtgatagctatacatattagtcactgttttacctgaatcatctttgagctggagattgagcagcaactttggcgtagcctacttcgccgacatacgtatttttgtattaacggtagccagcaaatccgacgatgatgagggcgattaccgcaataatgctaattgtttttttcattgaatgagaactcctcgtaaaatatatttataagccgttggcttacaataaaatttaattattactttgatactgcgggattcttcagaatataataggaccatggaatggatctatcgggaatttgctaaaaactcctgtagttaactctactttagtaagtccgttacccgagtctttacgctctctcccaactcactagctgttttcaatcaggcttatcttcaatgtagtagtttgaaggcggcataagtccaattggtcaaaattctgttacgcgaggttgtagctgtgtaaagattttctggggaatcccgcagtatcaaagcaagttccaaataactctcgaaaggaggtccttcctgtgaaattatttgttggtttagatattagttctgaaaagattgatgcttgttttatgactgatgatagtaacttatcaatcctaaatcgtttaagtgttgctaacgatttaaatggtgcttctgaaattaaagccttaattttaaaacatcacgcagaagtatcatttgaacagattgtgattggtatggaatcaacatcactatatagttttcatccagctatgtttttccaagaagatgcagacttaaatgcactaccaacggtagtcactgttgaaaacccatttaaaatcaagcaatattctcgtgtcttcgatgaagacaaaactgataccaatgatgccatgcgaattgctgactacttacgaattcaacgttttacaacgtcacctatcaaagaagaaaaatatatggcacttcaacgtttaacccgtactagatatcaactagttaccgaattagtaacggttaaacaacatttcttagaaaacttaacttataaatgtaatacgcttagtaaggaattaaaatcagaatctaccggcatttttagcgccacaattgtacatttaatgactgaaaactactcattagatgaattagccaatttaccactagaggacttcgtccaattgattcaaaatgttggccgcagtaactttaaaaatcctgaaaaactggttaaaaccattcagcgtgccattaaaaatagctatcagttgccgcgattaatgaatgagtcgattgatattattctcagtaccttggtagttcaaatgcgttcattacagcaaagtattaaacaaattgataaaggtatcgaaaaactagttgaaataattcctgaatatcaatgcttaaccagtgtgccaggaatcggtaaggtttatgccgcaggtatcttagctgaagtcggtcaaatcgaacgatttgatgatcaagcaaaagtcgccaaatatgccggtctatcctggaaagttaaacaatctggaaattatcagtcagaagtcacaccactaacaaaacaaggtaatcattatttacgttattggtagattgcaaatttaatccgaatttttggacaaatttgtcagcatcacctgatacggtgtttgccagtcgagtattttaagcggtcgctggttaatttggagtaacgtcgtcgttaaatcttgagcactaatgtgctcaaaacgagtccctttaggataaaaataacgtaaattccgattaaagcgttcattactaccacgttcagctggcgtataagcatggcagtaataggtcttaataccatattgtgattcaagtgatactagcccactaaactcagtgccacggtccacagtaaagctgtgcaccggaccattaaaagtggttaggaacttagttagtgcttcattaacagtcgctgtcgtccgatcttttaaccggtatgcccaaaggaaccgtgatttgcgatcgattaaagttaataaaactgccttactatgcccacgaggaccaacgactgtatctagttcaaaatcgccgatgcgcttacgttgattaatcatcatgggacgctgttcaattgatcgccccaaagattgattatatttggatcgttggtcaacgttacgccgttggcgtacgccatgttcaggtagatcattcaaggagaaaccaattctcccctgatttagccaattataaatagatttagtagctagtttaaattcgtgagcaatcattcctggtgaccagcttagacgtaaatggttgagaattttttgctttaactcatcgctcagcttagttttccgaccacatcgtgatcgcttgtattcggcatctgtttgtgctaattcagcctgataaggttgacatcgagataattcataagaaattgttgacggtgatcggttcagccgaacgcccatttggatattggacagccctagttcacaaaaggtttcgattttaattcgttcggaataggttatactagacaaaagatcagctcctaaaagatgggtttgtggtaaacaccattttaaaggaagctgatctttttgtccgaacagcgttcggattaattttacaatctacctattacttagttgaagccgccaactcggtaaaaaatcacttacctgaatacacagctttttataaaaagaaatataccgaaaccccgataaataagcaccgccgagctattgttttaaccgccagaaaatttgtgcgtttggttgatgcgctactacgcaatcaccaactttacacaccaccaaagagtgtgttgaaggaataacgtagttattcacgcaaatctttggaatacctactaaaatttttatgaattttaagtaggcttagtttagtgttgccaattttgtaaaattacacgatatttatatcaattatcttcttgacttattaccactagacttattccgaattgataaagttatcatacgatgttaagcgtaaaaaagcgacgattttaagatcagatgacaaaagtgttagccgagttaaggccattgtcacctaatgtttaaattggcggtattgtgcttctaaaatagcgctatctaagatgtgaccgcgcattgccgctgtcatttgatttaggtaaaagccaggctgtaaatcgagcgtggtatcaagtgcaaatactttaagtgtataagtgtgatcgcggttagggggtgtcatcccgccgtagcaagcacttgcttctgttgataaatggtctgttttgggactgtgccaagtattaacaccttggatgaaatcgggcgcttgttggctagcattagccgcgacagtggtcgtttttaaattggcaagtgtccagtgaatccaaggaaacccttgcgtcacttcgtaggcatctagatcgtagaaaacggcagcataactgactgtatcgctaggtgcgtcttgaatgttaaacggaatggaataagttggcacaccttccgcgttaaattgagtgccatgaccgccgtagaggtcgtcgaagtagccgtgatgaatgccagaactgataatttgcatgttgaatctcttttctattttagattttagtccagtcgtcaattgagcgaccatttgtgtcgcatagttcgagccaactattggtgccaccaaagtacaagaagaggccgatttcattcacgctcttgaaaataatgtcttcagtcgtttgattgtcttgaatttgcgctgcatgttcgttgcgcaagtgagtgcccattttagcagcaaagccaaacgagccatccttattaagtggcgcggttggccacaattgtgcccccgctttcaataacatctctttgcgcttttgccagatagctgttccttgtgcttcgcgcgtagcaacagtgaattcgatttggctgacggcttttgtccatcgatgacgtgttttagccggttttgctttgactggtgcgcttttggtcaggggataaccaaagcggctgaggaccaagatgatggcttcaacggctggagctaaggttgttcggaaattttgagagacgttggacggaagcgaggtgctcgttatcggtggttgattttgttcggctaatagctgccctacgtagccaatttgttcagtccactcaggatccatggtaatccagatacccgtgtcaacttgatcagtcgaggctgtttcaagtggggagagttgttcaatttgttgcagttgttgctgcgcaaaaccgaggaataaagcggggtgtgcgaatgcggttgtattagccggtgtttgttcaattaaaagctgagtaacgggttgttcgattaaatcgacgatcgtttgggtagccgttaatgttgcattaatttccaaggtcataggaagcctcctgacagtctttgatgcttctaattaaacactaaatcgctggttttgtcagccagtaagaattgattgaaggaatgcttgaaactgagattcaattaaccggaattaacgaatctttgttatgatagaaggtaggaattttaacgggtgggagaaatggcatgcaagcacaagcggtactaaaagaaaaatttggttatgatcactttagagaaggtcaagcagatgtgatcgaatcattgttggcaggcactaatgtcttggcgattatgccaactggtggcgggaagtcattgtgttatcaaataccagcattgatgctacccggtttaacgttggtggtatcaccgttgatttctttgatgaaggatcaagtcgatgcgcttaatgaaaatgggattccagccacgtttatcaatagtacgctaacgcagggggaagtccaagaacgctttaaccaagctgtgcgtggtgaagtgaaattactatatgtttcgccggaacgcttggattcggattactttttagctgatttagctgaattaacgattgatttgattgcggtcgatgaagcgcattgtatttcgcaatggggccacgattttcggccaagttatctacgcctgacggatacgattcagagtatgcgccaacgaccaacgattgtggctttaaccgctacggcaacctcgcaagtggcagctgatatcatgcaacggttgaacattcagcatgaagttaagacggggttttcacggcagaatcttgcgtttcaagtagttaaaaatcaaaatagtgatcgctacttaatcgattatttaaaggtcaacaaacaaaaatccgggattatttacgccagcacacggaaagaagttgaacggctcacgaagctgattgaaaaggctaagttagatgtgacaatgtatcatggcggattaaacgaagcggtgcgtcgtcagaatcaagaggattttctctatgatcgcaaaccgataatggtcgcgactaatgcgtttggcatgggcattgataaaagtaatgtgcgctttgtcgtgcatgcccagattcctgggagtttagaggcttactatcaagaagctggccgggccgggcgtgatggcttgccgagtgaagcgattctattatttaaagtgaatgatgtgcagattcagcatttctttatcgatcagtcggaaatggacgaagcgcataagcaacaagaatatgccaagttgcaagaaatgacgcagtacgccaatacgcagcaatgtttgcaacagtacatcgtcaattattttgatgatgattgtgaagcgtgcggccggtgcagtaactgtctggatacgcgtgaagaacaagacatcacgattgatgtacaaaaagtcttatcgtgcgttaaacggatggatgaacggtttggcaaagtgttggtggcgcaagtattgacgggctcgaagaatcaaaaaatcatgcaattccgctttgatgaactcccaacgtatggtctaatgcgtggtgattcgcaaaaagaaatcagtggtttgatcgattacttagtcgcttcaggatatttgcaagcttctggcggtcaatacccagtgctgcaaatcacggcggcgggagttgcagtcttaaaaggccaagcgaaagtgacgcgcaagatggcggtcaaagtgcaaaaaacgttgcctgaagataatgaattatttgaacaactacgtgagttacgccgcgatttagcggaagaacaaggtgtgcctccgtttgtgattttctcggataagaccctatattcaatgtgtgaaatcatgccaacttccttgactgaaatgctagatgtcaaaggggtcggcgaaaataaactagaaaaatacggcgaacaattcttggatatattaatggcagaatagagtgctgagcattgactggatttaccaaattggcgatgtaatcgctgatttggtaaatttggttaagtgcagaaatatgctggcgagaacacgtttcaacaaaaaagcgtcaacggattctaatatccgttggcgcttttttagtatctagtatggtgcatctgctggattaccatattcaaagtgttggtttgactttggattgggtttcgcatcaggtagtaaacacgtataacgtgtaccatcaggaccttcagctaggaagatgcgagtaaaatcattttcagtttcgatcagcttgcagttttcgtgggttaacccataaacatcagttacttgcgtaataatcatctctttttcttaatttgaaaggagtagagtaaccgtacattctaccaccgacttaataataagtatagacttttattggcaaaatttcaaattaatccccttatttggtttgagtttcaagctggtggagggtttgtttcaattcaagtccgccacgataccccccaatttgcccgtcttcacggtagacgcgatggcaaggaataatcatcaatagtggattgcgaccaatggcagaagccactgcgcgaattgcggtggggtgcccgacttgagccgccaaagcgctgtaagttgtggtttgaccatatggcacagcttgcagggcggtccaaacacttctttgaaaaggtgtgccgccgataatatcaattggcagtgaccacgtggtttggtcaccatcgagataagctgttaatgattcactataaggagcgattgcggcttgatttgcaactaatttcgtttggggaagaaaagtggttaattcactgatagtgccatcgggtgaaccaacaaaacagatacctttgggggttgctgcaataataaataattggccagcatggctaaaagaaccatagaagattgttagcatttagaagccctccttttgattgccctcagtatagcatgcccgttaaaaaacgaccaagccgtaaacaggctcagtcgttttttacttagttaagcaactggttgaaaggttttattttgaagatgatactgaacatcacaacttgctgcgacttctttttcatgggtgacaagaatcacacatttttgttgttgatgggctaattcttggaagagatgaatgatctcctgcgtattttgttcatctaagttaccggttggttcgtcggcaacaacgatgggggctgaacagcacatggcgcgaacgatggcgacgcgttgttgctggccacctgatagtttttgtacgttcttatgggcgagttcgggattgataccaactttgctgagcatttcgagtgcgaaatcggcggcactttcatgcgtcgaatgagtaatggccatcgcagtcaagacgttgtcgagtgccgacatgtaggggagtaagttgtaggcttggaacacgatggacacatagcgattgcggtattgggttaagccgattttttggatatcggtaccttcgtataaaatactcccgcggcgcggtttatctaaccctgaaagcatggtgagtaaggtcgtttttccagcaccactgctaccaatgatgccgtagagtttgccggcttcaaaatcgagattaacatctttgtaaagtgtattttctgcagtatcgtaccagtaactgacgtttttagctgttaacatagtggacctcctataattatccaatgagaattttgcgtggctcgagtcgtaaaatattgagtgatgcgagtaagacggcaaatgcgatgatggtgaagccgaatgcgccaagttgcattaaggtgacggcactaatcttcagatcaaggtcgcttgctttgacggcttttttagcagattggccaggttgttgcatttgaccacttggccgattgccaccagtttggccactaggggcttgagcgccaccagggccgccgttaccgccaggttgcatgttatttgtttgtgagctggttgtcgtttcggttgtgacggaacgcataacttgtttgctaagcgcttgaccagcgaatcgtccgccaatgccggctaaagctaaactgacaatcagcagcatgaacatttcaactaataattggcccacgattttgacgcgcttttcacctaatgagagtaaaacgcccatttcataacgccgttcgcgaaccattaagataataattaatgcgaggataacagtgccagcgatagcgactaaccaaacaatcttattagcaaaactggccattttctgcatggattgtttgagtgattggtaagtactgtcatcagctgttaccgtgaatttcttcgtattgataatcttcttcgctgcttttacaaaactatttttcttagttgggtcactaagcgtgaatgtggcactatccactttgccagtttgacctttaatttggttagctaatgtgtatgccgtatagatgacgtttgcggggtctgtttgttgtggacccatgccagcgctactttgactagccttatagatcccgactacttttagcgtataggcttttttgcctgtcgtgctggctttgactttaatggtgtcgccgactttgaggctgttttctttagccaattcagattcgatgacgacattactggtgtttttgtcgctactatttaaagcgcgacctttcgtgattttacttgtattatctttaaagtcgctgagggttgcggtattgagcactccggtgatttgtaagtcacctgttgaagtggatgactcagcgttgccgccagggccgccgcccatcatgccaccactattacttgaactacttgatgtcgtaatggctttaatggacgaggcgttcgcagaagtcgtgacgctgacgttataatttgccagcccggataatttcgaaatagccgttacgtcttttaatttgacggagggcatggttaatttagggcgcgttgctgtagtacttggggcatcactgctagccgaggcgcgcattttcttaaacgcttgatcgcaatttgcagaaagggtgacgctagcgcccacctgttgtttggtattgttgacggttgtaatggctgcatttctaatcaatagaccagccatgataaaaatcatgatgacggtcatcacaattattaataagaagctacgcccttttttaaagatgacgttttgccaagcacgcttgataaaattcataagtatttcctccttaaaactgaataaatattagtttaggcgggaaatatgaataaattgtgtttgaaatgaagttttttttaaggcgtatttgtgaagattaaccttatagggccaactttctagctcctaaatatggtaaattatagggtatcaaagttaatcggaatgaggagagttaaatgaagaagcgacaacaattttttaccttattatggacaggattaatgttaataatgcctgttgtttcagttattggtagtgcacaaacggtgtctgcgagtgagacaaaggttacacaagtgacaccacgtactgcatctagtacggattatcaaaaagcaatggtggctggggcgcaacagttgttgaataatggccaaccagatgcatggtcagcgttagcagctattcaatcaggcgtgacactgagtgcagcgcaacgcttgagttatcataatgccttggttgcggatgcacaatcaatgctcgctgatcaacgtttttcggcaaccgatttagaagtgttggtaattggggtaacagcacttggtgaagatgcaaccaacttcgctggtttaaatataattgataaaattattgaaaaagcaccaactggtgggatcaacgggcaagtttacggcatcatcgcccttagcatgtgtgattatggtgccaaggcacagcaagcgattgatagtttaattccaacggttttacaagcacaaaacgctgaaaatggctgggcttttttcggtagtaaaagtgatttagatacgaccgggatgacgatgacggcgttggggatgcatcgtgacttcccaggcgttcaagatgcgctagataaagcggtaacgatgttgaaagaaaaaacatttgttgcacaaacgggtggttttttaatccctagtgtttatatgacagaagaaaactcaaatagtacggcaatggttgtcatgggcttaattgcagctggagttgatccagtcacaacatttgttggcgatcaaggcgctaacccgatttcacggctggtcgcttatcaaagagcagatggacagttccgctggaatattaataacgatatgggatcgctagcgatgtcaactgaacaagccgtttatacgttagcccaataccggttgttccaagcgggaaaaggctcaatttatgattttaaaacgccagttattgaaaaagcatcggtaaaggcccaagcagttgatgaaaagggacaaattttaaagagtcttcaattagccgaacaacccgttggtcaaaccattacggtgaatgctaatcaagtcgcagttgagggttatgaattattagacaatgcacaacaaactgttcaagttgctaaaacgggaacgaccgtgacgttccagtatcggaaacaaatgattgggacaattcctgcagcgcagtttgctgacgttacggtgcaagcagtcgatcaaaacggcaaagtgtttaaaacaattcaattgcagcatcaaagagttggacgcacaatgttgattaatgcatctgatgttgcagttgagggttatcaattaaaagacacgccaaccaaatccatcacgattaatgcagcgaataatacaatcagtttcaagtttgaacgacaagtgactacggttgaaaaagaaaataaacaccaagcagacaatcaagatcatgctcaaataaagcaaaagcaattaccacaaacgggtgttaactcaacagtagttgcttctgtagccggcttgatacttttgactgggattattggcagttggttcaagcgtcaagttgaacatcgttaggagttagatatgtctaaaaagagaatcattgcgattatcggtagtttagttattttaagcggcatcggatacggtacctatcaaagtgtggctcaagataatccgtctacgcgtagtcaacatgttaaagaggaacatagatcaaaaaaacgggtcaagccagcaactgttggtttagatggtaaggttaaatctaaggcctctgagtcacatagtagggcggtatctgaaagtcggaaaacagctgaaacgcgcaagtccagcagtcaatctgaacagacaaatgaatcatcacaaaaatcggcctctagcaaacaattagcatcgcaacaagctgtagaacaaggctcggcagtccaatcggcatcgacccaatccgccattaatcaatcgtcacaatcaactgaaagtaaaccagttacaccgcccactacgacgccccaaccagtccttgaaaaggtgagcgtcaatgtttatggaccaattagtgaaggtaatccgaaatggttgaacggtgatcaagttgaaatcaaggatggggatatggtgattgatgttttaaaacgtgatttgcaaagtcgcgggatggcactatcctatcgtgggacgggcggcggcgtctatatcaaaggcattaatgggctattcgaatttgataaaggaccgttaagcggatggctttatcgagtgaatggcagttttcctaactattcttgtggtaattatcctgttaagagtggagatgtgattgattggatgtatacggaagatctcgggcacgatcgcaacgcgcctcagggttaaaatcgcaactggtctttgatcaattaaatccaatcgtcatctttgcgtattacgtgattgcaattgcgttctcaatggtttttattcatccgatttttcttgtaagtgaattgttgatgatgattgcagtgaacttgcttgcgaaaaaccagaagaaaacactggggacattgcagggtgcattgttcatgatgctctttatcgtcgtgatgaaccctattatgaataatcatggggcgcacgtgattgcgacgtttggtgggacggtgatcacagcagaggctgtcatgtacggttttttaatggcactttcgctggcgatcttaatgctagtgtttgtttcctataatcagagtatgacgaatcataagttcttatatttatttgtgcggctttcaccgcaactaactttattaacgatgattacgatgcggtttgtcccactatttattcggcggtttaccaatatcaagaatgtccaaagaacacgtggtgtgcagatggaaacggggagtgttagagcccgatcacatgccgggatgcgtttgatggaagtattattgattaattcattggttgacgcactacaaacggctgattcaatgacggcccgtggttatgggtcacagaagcgaacgagttatcaacgttatcgatttacccaacgggatggttgggtattggcaagtcttgtagcaggcagtgcactttgtttttattttgctaaacaggggattggccgcttagcgatttatccaatacttggctcgattcatttgaatcaaattggttggctatgtttggtgttagtcttattaattgatagtttgccgctattactagaaggatgggaatatttatggtggacattgcgcaaataaaacaatttaattttcagtatgcattggcaacccaacaaaatctgaaagacatcaatttaaccgttcagacgggtgacttcattacgttagctgggaactcgggtagcgggaagaccaccttattgcgccaactcaaaaaagaactctggcccgttggtaaacggtcgggtgagattattttcgagggccaaccgttagctgatttatcgcaagggttaagtgcgcagaagattgggatggtctttcaaaatccggataaccaattagtgatggatacggtcattcaggaactcgctttttcactcgagaatattggtgaaaagagtgcgaatattcaaaaacgaattgccgaattagtcagctttttaggtttccaagatttgctgtatgcttccgtgcatgatttatcgggtggccaaaaacaactggtcaacctagcgtcggttttgattttacagccggatcttttactgttggatgaaccaacagcgcaactcgatcccattgcgaccaaagaatttattagtttattgcaacgggtacatgacgaactcggcatcaccgtgattatcagtgaacaccagttggatgatattttaccgctctctaatcaactttggttgatggatggcggtgagataacgtatcaaggaccggttgctggtggattagcagcaatttgggcgcaaccggcattgcgtgaattcgtcccagatgtgccacacgtctttttacaaaatgagttgattgcaccagctgatattgcggcattaccattgaccgttgtcagtggcaagcaattgattgagcggcgacaatggcagttaacacatactaaacgtgaaatagccacgaacgaccaagcaacaatgctgcaggccaaacatgtgagttttcagtatgaaaaaaatgacccttatgttttagaccagctcaatctagaggttcataccggcgattggttagcgattgttggtaaaaatgggactggtaaatcgacgttgttgaagcttttgattggtttattacaaccgcgccatggtgcaatcaagttacaggggaagaagatcggtaagtgggcgcaagctgaacttttcaaaacagtgggttatctctcacaaacaccgagcgatcatttcagttatgatagtgtccgtcaagaatttatcgaacgggcgcggcagttaaaacgcgtaacaccagaacaagtggcagaagagatgctagcaaagctcggtcttcaaacccttgctgaacgtaacccgcaagatgccagtggcggcgagcaacaattgattgcactcgggattgtattgctagcgcagccgcagttactcttgttggatgagccaacaaagggccttgatccgattcgcaaacgggcgttgggtgaattgttaacgcgtttacaagcggaaggcttaacgttgattatggcaagtcacgatatggcctttagtgcccggtttgctagtcagtgtgccttattattcgatgggacgattgtatcggaggaagaaccttatgcctttttcgcgcataacttcttctatacgacaaccatcaaccgaatgttacgcagtcaattgcccgaagccctgaattgggaagaggtgcacgcatgaaagctttaaaaaatagttggaccacgtttggattggctttcttgattatggcgattttcatgttgtttatcgtcactttaaaaggacagcattttctgatcttcagttttatctgtttgattgccagtatgctgccattttattggcggtttgaaacccgggatattcgcgcccgtgaaattattttcatcgcggttttagcggcgattgcggcagtcactcgggtaccatttgcaccattgcccagtgttcagccaactagttttgtgattatcgtgtcggcattagtccttggtccagaatcgggttttattgtcggttcgaccgccgcgattgtctcgaatatgtttttgggacaagggccatggaccccatggcaaatgttttgctggggcatgatgggcgttacggcaggcttaattagtcgccatcagtgggcacagaataaatacttgctctgtatttttgggtttgtctggggctttatttttgggtggattatgaatctgtggtattttgtcgcatacgtcaatccactgacgattaagacttttattgcagcctatgtcgcgagtttctattttgacttggcccatgctttatcaaatgtcttttttattttcttcttttatcagtcgtggtaccgaatcatcagtcgctttaaagtgaagtatggtttgttggcgacggaagatgagctataaaattgagccctcaccaaagtggtggggctttttttaacggacatcatttcatacttgaaagttcacaatttggtcccaactgcttggtattctataaatatcagataagcatctcccaagtaagtgaatctgagcaagttaattttatgagacaattcctccctaaagaagtgtcttagcaacacccaatgagttgtagtttaacggtagaaccaatcatctaaattgaaattcctcccaagaaaatcaaaagcgattggctattaaaagcgaagcgtaaaatgaatgattgatgtgggttcaatccccgcaactcgatgactgttgtgttaaaaaagccgcaaccaatttggttgcggcttttttgcgtttagtagaccaatccctgtttaccagtcgtatggccagttaacagtttatcagtaatcatttggagattagcgaccgttaagcctgtgtagtgggcggtggtgattggatgcagaatccgcgcatcgattagccgcgcaatttgttggagaatcgccccttgactagtggtttggaattgatagtccgttttagtgaacatgtactcaaatgaaaatgaggctgatttaggcttaagcagtgcgagatcaagtggatgcgtattgctaacaatcgtaccgacttgtccaaacggtttaatcagccgtgcgacctcttggagatagctttcaatatcataaaggaccgcgatggcatcaaaggtgttatccggaagactggctaagttgtctaagctgctaggtgaatgataatccagcgggtgatcaactccgtttgtttttagccagtcgaaatgagtgagactgcttgtggcagtgacggtgaatccggcccacttggcgagttgactgagaattgatccaaccccaccggcaccattgataatcaatagttgtttgccacgattggcattttgttcagcggtaaaaccaagcttttcaaaaagtaattcataggcggttaacgaaacaagcggtaagccggcaatctccgcggcactgattgtactaggcgcaagcgcacaaatcgcggccggaacacattgatagtgttggaaactgccatcgatctgggtactgccggcatagaagacaacatcgccaggttgaaagttggtcacagtggcgccgaccgcttgcacggtaccatacccgtcatagcctaaaatggttgtggtgctagctcgtcttttaaggtcgacagggttgacgctacttgccctgactttgatcagtagctcttcaggtttaggcatagggattacaccagacactgcgtgccaattatgttcggtatcaagttggatttggtgattagtagtcatgatgacgtcatcctttctgaataaaatggttagtctaagcctactgctaatcaccgcataatacaaaaaaagacgcccaattaagaacgtcttgagttcatttaaattgcttcaacagtaacttcttcagttggttcatctgcagaagttgtctgtaaaaattgatcgcctgcaagatctttgtagaatgccatataagttgcattcttatatggcgttaaccagaaatagccaatgccaagtgagaggccagctaaaatatcccaacctaagaagcttagttgtaagacgaaaaaccggaatttatgcccattcattaactcacgactcttagtgatacaatctaaaaagctaacgtcagcttgtggatcgttatctgttaagtccttgaagatataagaagcttgagaataagcgtagcctttaatgatccccggaataatgaataacaatgcccaaaggaatgtaaataagctagctaaaattcgaattagaaaagcgcccaagaaataacgttttgagaagacactgaaagctcctttgagtgaactaaaatcagcatctttcgaacggagccaatctaagaaagtaaaattaatcccaagtgtaatgagccccaaaatgaaacttggaatttgaccagcaaaactactaccagacgaatggcccgaaaaagattcattggcagccattgatgggtcggtgtttgcgaagatggcaatcatggccatcaagactgctccgacaataatcaccccaataattgatagcagagtggggatgatgttcaacgtaacggcctttccccaatgaccagcaaataatgacttaacttcttttttaagtgaagcgcgtgattgatactctctttccatgataattcctaatttatttttaagtatctttgaaaggattgttggggattagttgttgaatgcactggtacatcaggcattctataaataatagcacatcataattaaatagtgtaaaatataaaattagctattttggttaaggggatgtatagaatgaataagggtcgattagaagcatttagcgatgctgtcatcgcgattattgtcaccattatgatcttggaatttaaaacgccagaaacaccggaaattaaggcacttttggaaaatggtccctacttttttgcgtatatcattacgtacgttttcgtaggggttgcttggtataatcattactatatgttttcgctgacgaaacgaggaacaaagcgtatttattggctgaataatatttggttattatccatgtcatttttacccgttgcaacggcttggacggggcggttcatcaatgaacgcggtccggaatatttttactacgtggttcatctgatttggttattggcctacttcttcttgagtgatgcattggcgaacgccaatcgtgaagtcgcccctgagcggtatcaaaaaattaaagccatgccgatctatagcacgattactagaccttatttctgggtgattcaagtgattctattagtcgctatttatttctttccacccatcgaattaattttcgtaatggtcgaaatttatacgattgggaatcgtaccgacaaagaaagtgatcaattattcaatgattaaaaaaacaccgctagcctattaggttagcggtgttttttgggagatctagaatttaataacaactttcccggttgagtgattcgtagcacttagttgatgggctttgatcaagccatcagcagaaaatgggaagacagtatcgataattgatttgactttaccatcggccattaatgcggcaatctttttaagttgatcaccatctggcattaaccagatggctttgaaagtcatattggtatctttaatgatggccgcagtttcaggcgcttcaccaacgattgaaatttggcgacctgtttcaggattgaggacagcccatgcatcgacttgtccttgacccccgatagtgtcgataacgagatcgacattgtgggctttatcggccactttttcagttcgatagtcaatgatttcatcagcgccaagttcacggacaagatcgaagttcttcgcactagttgtggtgataacgtgggcgcccattgcttttgcgaattggatggcatatgaccctacgccacctgaaccagcttggaccaggacggtttcgcctggttgtaggtgaccgtggttaaagagtgcttgccaagcagtttcgccagctaatgggacggcagccgcttcttcaaaagtgacattggctggttttggtgcgattaagttgtcatcaacggcaacgtattcagcataagtaccacgatttgaagtggcaggtcgtgcgaaaacttcatcaccaacgtgccattctgttacggctgatccaacggcaacaacgaccccggaaaggtcccagccaagaacgattgggaattcccattggaacatgcttgtgagatgaccttcacgtaatttccagtcgagtgggttgattgctgtcgctttagattgaattaggacttggtgttcaccaattgtaggcattggtaaagtaatcatttcaagttggttttcgtcaccatattgttggatggcaacagcgtgcattgtttctgacatatgaatagcctcattttcttattattagtaagtgtagtgtaccaatcaaatggttgttaagtcaattaacaggcttaaaaagtaaaagaaaagcacccaatttggttaattggatgctcagaaaataatgctgttaatcctcaaaggctaacctgtttgagtcagcactctgtatcaaacgtgctttttaaagctgcctcttgcgcttagccacgtacctgtaaacgatcgtctttggcgctcattcacggtacgattctaatgctcagaggcaaaccgctttaaacgcactttatatcaaacgtgcttctcaaacagccttttccggttaactacaaaacggacatcatggctgagacccgccataatgcccgtttttacgttaatcctaaaagtctaactcgtttgagtcagcactctatagttcttcttctgctatttttgctagtgttgtttttgatgggatgaagaatagggcaccagttgttggttcactgaagtcgagtaggtggtcataattgccggctggtttgccgacgaacatattggttaacatgcgttttgtcactgaccatgttcgagaatagccgataaagtaagtaccggtcattttttcgccagggtttgcgtatggaacgttcatgcgaacaatcttatgttccacaccgccttcgttatcttgtgagacaacgttgtgcgcgttggttggcttttcggcgtcagcaagttctaagtcagaaaactttttgcggccaattgttttttcttgttcttcagttgaagtatggttccagctgtccatggcatggatatatttctgcgcaaaagcgtatgaaccgttgatgaattctggatcttcatcgccgactaatgcgtatttagcagtttcatcgatagcgggattttccgtaccgtcaatgaagccgatgatcgcgcggccttcgaagtaacggaatccgtgtgtttcatcaatcgttgttgcgttatcagaaatgaattgcatcatttgatctaatacttcataacaaaccgccatttctttggcccgaatatggaagaaaagatcgcctccggttgcgacggcatcatgtttagggcttggaattgccttgaagggttccaattcctttggttttggtgcgttagggaataagtaatcccaagcatccgagccaatcccgaaagccacgcgtaagtgggcatctgggtaacggatattcatgctattgatgatcgctggaatgcgcgctgctaattcggtaacagccgctttgtccgcctcggcatcttgccgattcaatttctgggtgacgaaaatgatgttctcgccagcatctttaaaaacgtcttgtgcatctgtgggtgtaattgccatgttcagaacctccaaataaaaatttaaagttagttatttataatcattattatctagctcagtgcaagcataccaaaaaatggttttttttaccagtcccaataattaaaaaaagacatattggtagattgcaaatttaatccgaatttttggacaaatttgtcagcatcacctgatacggtgtttgccagtcgagtattttaagcggtcgctggttaatttggagtaacgtcgtcgttaaatcttgagcactaatgtgctcaaaacgagtccctttaggataaaaataacgtaaattccgattaaagcgttcattactaccacgttcagctggcgtataagcatggcagtaataggtcttaataccatattgtgattcaagtgatactagcccactaaactcagtgccacggtccacagtaaagctgtgcaccggaccattaaaagtggttaggaacttagttagggcttcattaacagtcgctgtcgtccgatcttttaaccggtatgcccaaaggaaccgtgatttgcgatcgattaaagttaataaaactgccttactatgcccacgaggaccaacgactgtatctagttcaaaatcgccgatgcgcttacgttgattaatcatcatgggacgctgttcaattgatcgccccaaagattgattatatttggatcgttggtcaacgttacgccgttggcgtacgccatgttcaggtagatcattcaaggagaaaccaattctcccctgatttagccaattataaatagatttagtagctagtttaaattcgtgagcaatcattcctggtgaccagcttagacgtaaatggttgagaattttttgctttaactcatcgctcagcttagttttccgaccacatcgtgatcgcttgtattcggcatctgtttgtgctaattcagcctgataaggttgacatcgagataattcataagaaattgttgacggtgatcggttcagccgaacgcccatttggatattggacagccctagttcacaaaaggtttcgattttaattcgttcggaataggttatactagacaaaagatcagctcctaaaagatgggtttgtggtaaacaccattttaaaggaagctgatctttttgtccgaacagcgttcggattaattttacaatctacctattcaatataattgctgggaaaagcaaattaattcgatcgatattaaaaagatactgtaaaatattttaaaacactatataattaggaatcgtgatagtaattaaagaaggaaacgggttttaaaaatgaatttagttaataatgacctgcaagttcataataatgggtcgatgcaagccgcaacacaggcgactaattcgcagcaagcagctgagttttcgaatgctttagaaacagcacaacaaacgatcaaaatcaaaaagggcgatactgtctctgagttggcagagaaatatcacaccactacacaagctgttgctcaggctaaccagttaaacgatccggattttattctagccggacagaacttaactattcctggaagagcacaaataagtgcggctgcgcaaccgacctctatggtcaatgatgctggaacagtagcgtcactagcgaatgttgaccttgatgagaacgcttctgccagttctagcaacagtttagagccaacattggctggggcagaaaaaagtgcacgtgattatattattcagcatgagtcgagcaataactataatgctcgaaatggacgctatattggcaaatatcagctggatcaaaattatttgcatggtgatttttcacctgccaatcaagaaaaagttgcggctcaatatgtccaacaaagatacggcagttggactaatgcacagaaacattgggtcaagaatcactggtattaaattgatttcataacaagaacggggtcacatcacaaaagatggggctctttttttcggaaaaaatttctaaaatgacttaaacaatttaaaactgaaccgatatatatatttgtaagcaacaaaatacaaaatattcgggggaacaaacaatgagaattaatactaacgtagctgcattgaacacatattcacgtttatctgcagccaatgcatcaaagagtgattctttggcaaaactttcatcaggtaaacgaatcaacaaagctggcgacgacgctgcaggtttggctatttcagaaaaaatgaaggctcagattggtggcttgaagcaagctaaacgtaatgcccaagatggtatttctttgatccaaacagctgaaggagctttgagtgaaactcatagtatcttgagccggatgaatgatttggcagtgcaagcttccaacgatactttgactgacgaagatcgtggtaagatcactaaagaaatttctaagctgcagaaaaacattgatgacattgctaaaaatactgaatttaacactaagaagttgttaatcggagaacagaacgctgatggttcagaaaaatctgatactttaacactgaccttccaagttggtgcaagcgagaaacaaacagatacagttacactgaaaaaaatggattcaacagcactgggtgttaataaaagctcggaagcaattcctgagggggaagctggaggccctaaagatgctgttcctggaattgacttgagttcagcagcaaatgcccagaaagccatcacgacgatcaaagatgcaattaacacagtttctgatcagcgtgccgaacttggtgctactcaaaacggcttgaaccatacgatcaacaatttgggaacaacaacagaaaatctttctgaagctaactcacggatcgaagatgttgacatggctgaagaaatgatgaactttacgaagtcaaacattctttcacaagcagcaacatcaatgttggcacaagctaacgcaatgccaaacagtgtcttgtcattacttcaaggctaataatttgaattattaaaagcttgattgaagtgtaaattatttgtttggtttgtttgagttactcgttttttaaagaaacgggcagttttttaaagaaaaataactttaatttagcacttaaatgtttggaataaacaccgatattagtaaatataaacgacctacaataatattagggggaattttaaaatgagaattaatactaacgtagctgcattgaacacatattcacgtttatctgcagccaatgcatcaaagagtgattctttggcaaaactttcatccggcaaacggatcaacaaagccggcgacgacgctgcaggcttggctatctcagaaaaaatgaaggcgcagatcggtggcttgaagcaggctaaacggaatgctcaagatggtatttcattgattcaaactgctgaaggtgctttgagtgaaacgcatagcatcttgagccggatgaacgatttggcagtgcaagcttctaatgatactttgactgattcagatcgtactaagatcactaaagaaatttctaagctgcaaaaaaacattgatgacattgctaaaaatacggaatttaataccaaacaattgttaattggtgatggtgatgacgctgggaagtctaaagatctagtgcttactttccaagttggtgcgagcgagagtcaaacagatacagttacattgaaaaaaatggattctgttgccctaggtgttaatggtgatataaaagcagttgaaaaggatgaagagcataacattgaaggttctgctaaaattgacgctaaaattaacttgggaacagcagaagatgcacgaaaagctatcacaacgattaaagatgcaattaacacagtttctgatcagcgtgccgaacttggtgctactcaaaacggcttgaaccatacgatcaacaatttgggaacaacaacagaaaatctttctgaagctaactcacggattgaagatgttgacatggctgaagaaatgatgaactttacgaagtccaatattctttcacaagccgcaacatcaatgttggcacaggctaacgcaatgccaaacagtgtcttgtcattacttcagggctaataaaatattattggcacaggccgatcgtcgtttattcggcggtcggtttttttaataacaaggtggagtgagacgggagaaagtgagcactatcggaccttagcttcaaatcacgtattttgcgatgtgaagctaaggtccgataggcagagctttctgtctcacgtaacctgactaagaaaaacaaggtggagaaaatgcggtatgaagccgagcattaagggactttaacaataagtcatgtctttagcgacttgttgttgaagttagttaagcgcaagcttttgcatttcgtaacctgactaaaaacaaggtgaaggcatatcggggacttccaagcattgtcggaacagctgatttcgaaacgttcttatcatcgaagtctgttgcttagataagccgaaagaagttgacttgtgcagcctgactaaatcaaaagagaattcaattagaaatattggagtgaatatatgtaagacacagaaagaaggaacaggtaacatgcagatcaataatattccaccagtcgaccccacgccggctgttaataaaatccagaaagttgcgactgatagttatgaaatggatacttcattaatggatgaatcattcattcgtaaagatcaggaaaaatatttgggtaaactttttcagttaaatgatggtaaaaacgttaaagaagttgaggattcagccgataatgtagtcgtagacccgcaagaactgcaaaaagcagttgatacattgaataaaaagttactgggtcgcgattttaaactgaaattcgaaattcatcagcggactggacggcagtacgttgaaatggtggatatgcaaagcggcaaagtgttaaaggagatcccttctcataaaatgcttgatgttttgggaaaaatctgggatcagatgggaattacggtcgataagaaaggatagtgacgtaaatggctgatattacaagtgctacctcagcacccaatgcagggctcagctttttgggccagtactctgggatcacaacggatgttgttgatcagttgattgaggctgaatctggcggtaaaacgctgttacaaaataaagttacgaaatataaccaggaaaagtctgcctggagtgaaatttcatcagctttaagtaattttcaaactaagcttaaagccttgcagaataatgacagttattattctaaaattgctaaaagctcgaatgaagatcttgcaacgatctcaggaaattccgacgccaaaaatggcggtgattttgaacttttggtcagtcaattagctaagcaaactaagttgactggtagccaggtcagcgcagcagagacgaatagcactgatcttaacttgaacggtaaactgacttttgcttatcaaggagaaaaaactgacgatagcccagaaactgttgatattgatattacagagaaggattcactactcgatattgctgataagatcaataaagaatcaaaaaatattggtgtttcggcggtagtgatcaacaaacgcctagttttgacgaataacaaatcaggtgctaaagaaacaacactggatcaaacaaagaatacagctactttagctgccttgggcttaaatacttccgctgatctgggtcaggctgccaagtatagcctagacggcattgacatggaaagtgatagtaacgtgatctctgatgcgatcgatggtgcgacggtcaccttgaaaaaagagatcaagcctgaagatgccgtcactttatccttgaagaatgatgattctaaaacagtcaaggccgctactgattttgtaacacaatacaataacttaatgagtttgatcaaaagtaacttggatgtgggcaacccgtcagcttccacagcggaaagttcttcgactaatgttcaaggtaagctggttggcgattcgaccttgcaacggctacagtcatctttgagaaatatgatcacacaagccgataaagacaatggcgctagtctgagtccttttgatatgggcttttccgttgacaaggatggtgttttgagccttgatgaagacaagtttaagtcacagttagctgattcaccggaaaaagtccatgactttttctatgttcaaggtgaggacagcttcgacgaaagtacggacacgggctatactgctaaattaaataatctagtcaatgaatttattagcaacgatgctactaaaaagggaatcattactaataaaagcgatagcattgataagatggtcaaagacttgaactcgcagatcgatgacttcaccgcgcgtttggccgataaacgggaacaatatattgcacagtttacccagttagactcgatcatgatgcaagctgattcacaaatgcaatacatgcaaagccagttgggtgtagatcaacaataataacgatcataaaagaggagcagaagtttggaaaaacgagaagttgaacaaatattaacgaagttaaagcaaaatatgaaagactgggaccaaacaactgcttccattctagctttactacaagccaatgatcaattattgactcaattgcaggaaactgagtcaaacttgtcagcgcagcaaaaagtggttttacaacaagtaatgtctgaatatcagagtctgatgcaagtaacggcgaaagagaagaaaaaagtgttgcagcaattaaagagtttagatcgtcaaaagtcttccaggggtgggacttaccaccaaaaaattaccgatgggacgatgatcgaattagaatattgatccgtgacttcaagctggaattacaaaatagttaaattgatggcgggggaattgaataaatggatgtaaaacaggcacaaaagcaacgtaatttttatttgaagaatcaagtgttgaccgcttcgcctaacaagctgatcagtttattgatctctgggggcatcaaagcaatcaagttagctgaaattgcattgaatcaaaatgatatggtaaaggcaaatcatgaattgcttagagctcaagacattgttgatgagctgaaattttcattagatcattcggttgatagtcaaattacgacagacttaaatcgtttatataactttatcacgcaacaattagtggccgctaatgtcagcaaagacaaggaaaagctgccgcccattgttaaattgttagaagaattattggaaacttggaatgaagttagccaaaaacaaaatatttagttgaaacgactacaggcttgttaattctgtagtcgttttatttttttggaaatttttttaatgagtttccttaaatcttttcaattttgtccgataaataaaatggaagagtgaagaggaggagaaaaaatggacctgtttttactgatcggtatctgtgccgcgttggtcatcgtggtggcagcgatgattttaaaaggtgctagcttagccatgttatttagccccgaggccatgatgattatttttggggggatcattgtagcgctgatcaatacatatccgctggctgacatcaaacgtttaccaggaattttcaaagtattatttcaagcaaaaaagtatgattaccgcgcaacgatcgataaattagtagaattatcaaatgttgccaggcgtgaaggcttgttggccttggaaacgcctgttaacaacttagatccagaaaaagatgcgtttttaaaacgcggcatggagatggtggtcgacgggatcgataaagaagaaatcgaagaaatcatggaaaatgagatctcatcgatcgaggaacggcatgctaaaggaactgccatgatgcaaactgccggcagtacttcacccacacttggtgtgatgggtgccgtgatcggcttgatcggtgcacttggacacttagataacgttagtgtcttgggagagtcgatctcatcggcctttgttgcgacgttatttggtatttttatgggatacttagtgttcatgccttttgctaaaagactgcaacgtaaatcagaacaagaaattcaaaatttagaactgatcatggcaggaacattggcgatcgaagaaggagtttcagcgaaaacaatggaaaagaaccttgaaagtatgatcagtgaaaccagacgaactgacattgaaaaaaatgagtagattggaaagaaagtgggacaggcatgcgtaagaaaaagaaaaaaaatgatagtgatagtgaagcctggatgctcccttattctgacatgttaacattgctacttgccctgtttattgtgatgtttgcttcagccaaggtcgatgatagtaagttccaaaaaatcagttcagagtttgggtcgatcatggctttgtcaccagagcaacaaaatcataaaagtgcggcagtcggtggatcaaacgcaatcgaacttgattcaccatcagtaactaataaagaaaaagatagtcaggcaccggaccctaaaactaaaaaagcagcgatcaaacaagaaaatggagtaaagggcagtatttcacaacagaatcaagaacagcaattaaaagaaattgctcatagtttaaacgaaactgctgcagagatgaacttgggaaaaaacacaaaagcttcactcaagtctgacggactacatttaaatttggatagcaatattttatttgacagcggtagtgcggatctgactgccgattctgctgcagctttaaaggaactggggccaaaaattcaacaactaaaagaaaatgaggtcattattgctggttatacagataatgtgccacaagaatcgaaagactatccaagtaactgggaattgagtgctgctcgagcagtttcagtcatgcggttcttcgtacagcaaaaggcagtgacggaaggcaacgtctcaattgaagcttttggtgaaaataaccccaaagcaactaacgatacatcagcggggcgtgctaaaaataggagagtggaactagtgataaaaaaataaactgagcaaattattattgaaaatagttgaagtacattttcaatatggaatagcgaaaaatgaaaattgggtgggtaattcggttattcagtaagaaaatctcattttcttcgcaaaaattatttcaacaagaataatttttgaaatataatataagtaaaaaatgccaaaaaaatgactaatttttaaatttgtatattaacaagcaaatttattcctcaattgtcaagttaagtgcaacactaatggcctattcttataattggtctagaaagttaaaccagttgtggcataacatccgctggacaactatagcttaaacagcggcggggacggtgattcagcgtgtcttgaaccaactgcagatccactaatgagaggtttttaaaggaatacccctttgggaagaactctcttaattgaccattcacattctcattagtgccccgttcccagggagaatatggatgggcaaagtagatttccgttccttgaacctgatttaaactagcgaattccgagccgttgtcaaacgtgatagtccgaaagttttctgcaccgtaatcatcaatcgtatcttggagggcttgccggcaagtctctgcccggtaatcaggcaatttaacgataatttccatccggctaactcgctcggttaacgtcattaaagctggttcggactcaacccgtttggctttcactaagtcgccttcccaatggcccaactcctgacgtttccgaaccactgcgggccggtcttcaatggactgtccaagccgttttttattcaggcgggcatgtcggtgattcgggcgtttaacgcggcgacgtagcttcatgggtaaatcatagttgtgaagctccgggagcttgccagcctcgatataccgatagaccgtagccgttgatgggcagggaaagcccgggtaatgagctttgaaatagtggacatacgtgtcgacactgaaaactcgtggcttagcttttaaagctttcggcagggacttgaagaacacggcagcccgctgcagtaaacctttggggtgacacttggcccgctgttctcgatagtaagccgccccgcgctcggcaaagtagccctgatatgaccgatgtttctgggaatcaatctgggtggttaacccgcgttttaattcgcgagaaatggtgctgggactccggtgaagccggctggcaatctgacgaacgccaaatcctaatcgagtcagggactcaatttgaccgcgttcaaaagattggagttgttggtaatgcttaggcatgatattcttagtttgggtcatgaagacacctatccttatctgttgattttgtcgttaataataagaataggccttcatggccttttaagctagtctaattggtctagttatcaagtgttgcacttcaattttaaatcggggaagcaaatttattagacattctttaaatttatatataaattagcaatcaaggcgctttcaaaatttttgtggttcagaaatggcatacataaatgcgatagttcgccttttttagtctcttgaaatgtcaaattaagttagaaataacatagctgtttatctgtgatgttttccatgaatacctcaattggtgttttataatttaatgattttcttggaatacgattacgccggctactgacttgttgaactaaagcatttggtaaattgcgaaaatccatgctcttgttgagaccatctcgtctaattagtccattattattttcgtttaagccacgctggttaggagccccaacttcggcaaaataagtactaatatcatgcttatttgcgatttctttccaaccagtgaattctttaccattatcaaaagtaattgacttgaaaaggtgttttggctgttgggacaaccattgattaagatgtttattaacgcattcagccgatttttgttggatgtttaaaatgatttcaactttggagagacgctcaactaaggtcataactgcaccttgatgtgctttgctttggacggtgtctgcttctaaatgaccaaattcatgttgaaaatgaggataatcctgatagcgttgataaatacttctgccgagtcggccagctttaccacgccgttcaacgtaaccatttggatgccttttacctttcattggcaacaatttcacattgaaaacacctctttgaaaaagtcggtataaggttctcatactacaactgatctgtatctcagctcgaacaataatcgtatcaggggtccaacctaatgcgagtttctgcttaatgtatttggtttcatcttctggtaattcaattgcttttcgaccgcaatgagttttattaactcgatgattttcttgaaattgactaattgaattaccagcatctagaaaccggtaaacacgataaacggtttcgctggaacgtttaagagctttagcggcatgataggctttaatatcttatttccaaaagttatatataaaggttaattcacatgtggtaagatgtttataagtcatttgtggttacctctcttttgattagggatattcaaaagtctaccacaaatggcttttttatttctaacttaattttacaaacgacgagttaaaaaaataattaataaaataattcctgaataattcatactttgttgcgtaaaggtaatttgccccttttaacgtttaatttagctcaaatttaatccgcaactatttttgagtgtatttgagctatttttaagacaattttatttttgattggtgtcaaaagagtaaactactcccttgatcgtacttaaattttttaaattgtcttttttaattactagtgagctgaaattcttgaatcctaaacaatgtttgccagtataaatcatcaaaaacattggtactagaaagatgcagccataatttacgtgcatgttgggtgactctgccggccaaatgaaagagcttgaaacgtaaagtggcgctcgttgcgttccctaattcagctgggaaaaccagttttttcatggcttgaactaagttataagccacaccggcgagtaacattctaaactggttagccgtaaaactggaactatccgttttatcaaaggcaaagccacttttaacttctttgatcagatcctccatggctccacgttggtgatagagttcaaagacgtcactggcaaaagccagctccaagttagtcacgataaattcgtgtttaaagagtagctcgccagcagggcgagttgatttaatgatcacggggtaagcgcgaccccaagtgtccggttggtaatctgtcaaacggtgccactggacatctttttcggcgaagtcttccccaggttgccccacatggatcaagtgctcggcgatccgttgtagttttggattagccttgagacggatcgtaaactttgccccagcttcttcacaggcggcataaatttctggcttggcaaaacccgagtcagcccggactagtacatctaaagcagcgtattgtttcagtagcggtttcaaaaaagcttccgcatttttggaagtgtattcgttacctggccgtaatttagctcctaagagacaacccgaaaaaccatcaaaagccaacaggggatgataaccgttcgtttgataatgggtgttaaaagcactgcctttctggtaaccaaatgtatcggaatgagtcgaatcaagatcaatgatcagttgacgttgcttcttttgtgtgatcactaactgcgctaacttggcgactaattttgtgatcccggccaagtcgtctgtggaaatttggttgatatagcgtgaaagagttggttgcgaagcaactaaattatctaaaacaagctcaaagctcatgtctgcggtcagtttattagcggcagtatcgtcgaaataacccgcaatcagctgaatcaacagttgtttaaacagctggttcttatggtacctatagaacttgcggttttccttaaaatggagagtttctttcaaaaggcgcttaaagtggatctgatgcataaattcagccactaaaattagacccgcatcgttagataaatgaccaccattattagaaagaaccagatttttgttgaagttaacggtttgttgttgtaaagtcgacatatggagcactcctgttctgtgttggttttggtcgacttaacaatagcacaggctatgctctttttgtatacgcaattaaacacctaaaaggtgttggtttggatcacggacaaacaagatgataacaggcaaagaaagaaaaactgttaaagatatgaattattcaggtaattgaaaataacttaaaaattaacttgattgtgagtatgttaacagctaaaattataatgctgtgaaaaatatagaaaaagtttgataaaggggacatcttggctgcaagcaactactatgaaaattgaaatataaaaagtttgaaaatattagtgttaaatcaaagaaaataggtgtaattaattttggaaaatacatatggcttaatgaaagaagctttaaacgtttcttctaatagagcacaattgaacgcaaataatattgctaatgtcaatacgccgggtttcaaagctaaacgaatcgagtttgaaagtgttttgaataatgctttggaccaagaaacacacctaaaaactacatctaaaatgcatatgcaagcaggcggggcaattgaaccgcatgaaagcgtgcgcaatgatacggctgttaaagaaaatggcaataacgttgatttagatgttgagatgttaaatcaggcacaaaatggtttgaattatagcgcgttgacatcacaactcaaagggcgttaccaaatgatgagttatgttttgaatcattaatggtaagactaaattggagaagaggagatcagagtgagtatttttaatggattgcagatcaatgccagcggcttagccttagagcggttaaagcttgatacgacatcaactaatattgcaaacgtcaatacaacacgaacgccggaaggtggcccgtaccgccggaagtcagttcaattcgctgaaaatttacgtcaagtcgaagcagacaatggaaatatcatggaagccaacaaacgacagagttccggtgtaagagtgactggcattgcacaggatcaaactgagaagttgagttataaaccagatgaccccgatgccgaccaaaatggttatgttcatttaccgaatgttaacttggcggatgagatgatcgacttgatccaatcgcaaagatcttacgaagcaaatgttgcttcgagtcaggtcaataagcagatcttgagtaaggcactagaaatatcagaaaattaggagagataaaatggcacaggtcaatggtattaacggcttaaataattatgctactcaactgcgcaaagttactggactcgataattctgatcagacagttaaaggcgccggtaaaacattcggtgattatttggatcatgctttatccggtttaaattcaagcatgaaagttatggatcagtcgactaccgatatgatcagtggaaaacaagatgacttagggcaggtcatgatcaatatgactgaaagtcaattaactttacagactgcagttcaagttcgtaataaagctttggaagcttataacgatcttaagaacatgcagttttagtcgtgtagtgggggcttggaagtggataaagtaaaggacttttttggaaacttaaaagacaaatggtctaatctaaatcgtttagtaaaaattgctatcatagctggtttgatcagcatacttgctgctggtgggatcgtatattatctgaacaccagagttgagtatgccgttttgctttcgaatttaagtgacgcagacgctgggacggttacgaaagatttggaagatcaagacatcaagtacaagttaaaagatgatggtaaaacgatcttagttgataagacaaaagtcgaccagtatcggatcgatatggccgtcgataacaaactgcccgatagttcacaaggctatgagttatttgatgataccagcatgatgaccactgatgaagaccgtaagatcatgtatcagcgggcaacgactggtgagctggaacgttcgatcggttctttaaatgctgtcaaaaaagctaaagtaatgttaacgatgcctgatgatgatgtctttagtgatgatgccaaaggaaaaaaagccaaagcatcggttgcattgacgttgaatggcaacacgatctcaaattcagcagttaaagggatcgttgagttgaccacaggtgccgttaagggattaacagccgaaaacgttaaagttgttgatagtaatggaaatgtattggctgatgggaataatgacaatgatgatctgacaggtgcgaacagtaaatatatgcagatccaaaaacagtttgaaaaacaacttgaaaagaagatcacacgtgttttgggcccattagctgatggaaacaaaatcagcgtcgcagttaacgctgaccttaattttgacgcactggaacgcaagactacgaaatatagcaatccaaatttacggagtgaaaatgttcaagctaatgggaaccaagaacagatccaacaagcacagactggtcaaaccgatgataatgtctctaacgtaactggcgataataccgataatggcgcttcatatagccggacgatcaataatgaattagatactgatgtgactaagcaagttagcgcaccgggaactgtgaagagattaacgacctctgttgctattcgtggagatgttagtggggaccagcaggcgcagatcaaaagtattgtgcgttcagccatcggttacgataaggatcgtggtgataaagttactgttcaagctttagatgttccagacacgacaccaaaagttcataagactaagacggtgaagaataatgtgccgtggtggtacatcgcccttccgatcggtgtcatcgcaatcgctggtatcgcagcctttttgatcattcgcaagaaacgccaagatgacgatgatgactactacgatgatgattatgatgtcgatgtaactgatgattcaccacaacctggacctacttcttcagcgaatagtgagccgttaccggaagcaaaacaagagggaaaagcagtacctctgcaggaaaaaccagaagtcaaagaaagacaagctaaggataaacaggctaaagattatgcccagactaatccagcagttacagctgaattgctgaaagcttggatgaaagatcatcactaggaggggaaataagagatggctcaattgagtggagtaaaaaaagcggcgatcttaatgatctctttagggtcagaagcgtcctcccaggtaatgaaacttttacctgacagtatgattcaaaaagtcagttatgaaatagctaatacagattatgtgactccagaagaaaagaatgctgtcatcgatgaatttgtcgacactgccacagccagacaatatgttttggatggtgggatcgactacgcaaaggatcttttagttaattcgttagggccgcaacgagccaaagaagttctggatgttttgaacacgatccagttgcgggaacaaccgtttaacattgcccgtcgtgctaatgagcagcaattagttaatttgctagtagaagaacatccacaaactattgctttgatattgtgttatatgcaggctgagaaggctgccagtgttttgtcagaatttccagatgaattgcaatctgatgtagctgaacgagtggcaacgatttcggccacttcaccagaaacgattcagcggatcgaaaaagttatggaagataagttttccaatgtggttgatggtgaacgtgagagtatcggtggtgtcggcgcattggtcgatatcttgaattcaacgggccgcagtactgaaaagacgatcttggccggtctggaaagcagacagccagaattggccagtgaagttcaggccaacctatttactttcgaagatattactactttgcaagcgttggatgtgcaaaaagtattacgtgatgtgacaaacgatgtattagagctggccttgaaaggcagcgatgatcgtatcaaagactttatcttcggtaatatgtcacaacgtgcggttgaaaatatcaaagaagatcttgaatttatgggtccaactagattatcagctgtcgaagaagcacaacaaaaagttgtcgcagttattcggaagttagacgaaagaggcgagatctatattggtcgaggaggtcaagacagcattgtctaataatattttgaaacagcaggcaatgcccctgcatggtaagaaagttggtataaagacagcagattttgttcctcaaataaaaaagcaagatccacagttaacagctcttgacgctaaattagcacatcagacggcagcttaccagcaaaagctaaaacagctgaaagctgagatgttagtagatgcaaaacaaaaggcagcagaaatcaagcaagaagcctatgattctggttatgctcagggaaaaaaagatggataccaggaggctgtgacaaaaggacaacaaaaaatggcacctctagtcaagcaggcacaagataacgtggagcaaagtctggcagagtcaaaacagtacctggcagaaaaacaggatgagatcacttcttttgcagtacagttggccgaaattattttgaagacgcagttggaactaacgccagaaaagatcactgcaattttgagtccattattattcgaactcgaaaaaccaaatgaagtattgatggtctgggctaactccgcttatcatgaatcactgaccactaagttagagcaggtcaaagaagaaattcctgatctgcgttacataatttttgatgatgatagtttaaatgctttgcagctgcgtgtcgaatcaaacgaatcggtagttgatattgacattaaaaaggaattacaaggttttctggaacaattgtgaggtaaataaatgacattgtgaggtaaataaatgacaaagataaagatcccctttaaaaattatttaaaccaagcgaaaaaatatcctttttattcggtatacggcaaagtcagcgaagttgttggtcttgtgatcaaagtcgaaggtttgcaagccttcgtcggtgaagtctgtgaggtctatgcgaaaaaagcgggaaaaaagacagtgacggaggttgttggattcgttaaacaaacggtcttattgatgccattagatgagctagaggggatcgcgccgggttgcctagtggctgcaactggcaagacacttgaagtcaaggttgggccaaaaatgctgggacatactttcgatggcctaggacgtccattgaaaggttccaagcttgaccagtctgaaatggtcgggtatccagcgatgcaggaagccccagatccatttaaacggcaagacattgaaaaaatcatgccgactggtattcgagcaatcgatggattattaacggttggcgagggacagcgagtcgggatctttgccggcagtggggtcggtaaaagtactttgctggggatgatcgctaagtattgtcaggccgatgtgatcgtgatcggtttgatcggtgaacgtggccgtgaggtgagagaatttatcgaaaaagacttgggtgaaggttatgctaagtcgatcgtagtgtgtgctacttctgatatgccgcccttagttcggctgaaaggtgcatatacggccacggcaattgctgagtattttcgtgatcagggcaaaaaagttgttttgatgatggattcggtcacacgttttgcgatggctcaacgtgaaattggtctatcaactggggaaccgccaactacccggggttatactccttcggtttttgccgaattacccaagttgatggaaagaagcggaatgtctgacaagggttcgatcacagcattttatacggtcttggtcgaaggtgacgacatgaacgaaccgattgctgatgcagttcgcgggatcttagacgggcacattattttatcgcgagaaattgcggcccaaaatcattatccggcagttgatgttcaacctagtgtcagtcgtttgatgaaatcgttggtctctcaagaacataatatccatgccagtgaattgcgtgaaaatttgaaaacatacgctgatgcgaaagatttgatagatatcggggcatataagagcggaacaaatcctgtgatcgactatgctgtgcagctgcacaaaccgatcgatgactttttgcaacaagccgtggatgaattttcaagtttcacagatacagaggagagattgcagcagttgtttgcttcgaataatgttttaggtgacggtcggatcactgcagaagggtagggagatcagggatggaagaatttaatttttcattacaaaaagtgctggaatatcgtttgcaagttgaagaccaggtcaaggggcattttgctgaagtcaaccgcctggaaaacgagaaaaatactgaattggatcaagtcatgcaagaaaaagacagcatgatggaaactccacaattttcagttagcagaatgcaagtcacacgacgctatattcaagctcttaacgaccagatcatgatttgtcacgatcaactgttggggttgcaagcacaaaaagagcaaattcgcagtgaattgatcgaagcacagaaacaacggaaaatattagagcggcttaaaacaaagcagcttgcacaatatcaaaaggagctagcccatgaggaacaaaagcagttggatgattttcaccggccacaacaaaatgtaaatatcgcttgaccttgacgttaaagcaagggtttgaaaggaggacaatgaaatgcaaaaggtagttacaggtaagaaaattgctggtttgcaggttgctaaagccaagccaaccaaaaaacaaacggggaaatttcaggcttttttagcacaagataagccggaaattgcggttaatgatgataaaggtttcagacaaaaaaaggctaaaaatcgactagagacttctaaagacatgcttaacatacatattaaaactactgattcgcaaacaaaaaaagagctagagcaagtcttgcaaattgactcgaaaacgttccaacagttagtaaacggtacagtttctttggatgacttggtcaagcaaggaaaagtccaaatatcgcctgatttgctggaaggactcaaggaattagttagcagtagcgatcatttgaaaaagcaaaatattttactagagatcgagcatgaccaatcagaagcagtcgaaccgctccaagaaaatgataacgccggaaaaaatgaaaaattacctaaggatgctgctcctccactagacttaaagcaagccaaggcaggaccgatagccgaaattattgcagacaatgacgttgcaccacaacaaaccgagcaatttggcgaaaatccggcacaaagcgtaattgacttggatgaaatgtctgcaacccagcaagcgaccttgaaggaacagatagcaaactttgttagtatggtaacttctaagtcagctggtgaaagccaggctattcaagaatctaactcgacaataaatctggttgtgagttcggacacaaagatcaagcaggaagctgctcagcagactgatctggaagttgagtcggttcaacctacaaagatcattgagagcccgttagtttctaaagcagggcagctgggtaaacaagaaattaaaacatcacctgaagttgcagcgatggcagacgagctttcagtatcgtcgctaaaacagtcagcggaaattttatcagttagttcaaaaatcttgatcggtacgaaagcttcgctagcaggacaaaaacaagcagctgaaatcatagattttagtgagcttacagatagaacgtgtatggtaagcgtagttgaacaaaaaagcgcgacagttacgcaagctaatgtggggcaaaaagtaacaacgataactagaccggtcgagcaggtcgtgagaaatttgcaaaaagcacttactccagtagttgagaaaagcttgttatccagtaagggcaatacccagagcatagtttttaatttgaaaccggctaatctgggtgagatgaaagttgcggtaaagacgaatgaacaggcagtcagcctagaatttgaagttcaaaatagtactgcacgtgatatgttacaaaaaatcacacataaattagagcagatcatggagcagctgcagcttgatccaacgactaaaacattgaaacaagttgaaactgtgagacaaacggcggaaacttctgaacttttaggcgagcagcgagatggtccagctggtgatttcatgcaaaatgagcaagaacagcaacgccgatttgcacgttcgcacaagacgaggacacaagtggtcagtgaagaacatttgccaggcgaagaacaaatcaagcacggaacgatcagtttgttggtttgagcgtctcagagtatgcgtgatcaaaggaggaatatatttcatggacaatttaagcggtgtacaagcaaacagtcttggcagttcgagtgagataacaaaaagtacttcacaaaacggtgctgctaaaaatgctttgggactttcaatggatgattttttgaagatcttagcgacatcaatgtctaacccttccatgaccggagatggagattccaatagcagtggtacagattatatttcacaaatggcacaatttgctaccttacaggaattaaataatatgtcgacaatgatgaataattctttgcttttagggcagcaacaacaagctttcaatttaatgggcaaggatgtcacagttgttgatgaacaaggcaatgaaaagcaaggaagagttgataaagtcaactttactggcggtattgccaagctgaccgtcaacggtacggaatatgaaatgggtgccatcaaagaagttagagaaccaaaagattaaaaaatagcaaaatttaaaaagatgctacacaaataggaggaattttaaatgttacgttcattgtattcaggtgtttcaggaatgaagagtcaacaaaccaggttggatgttatttccaacaacattgctaatgcgaacacgatcggcttcaagtcaagccgtgctaacttttcagatattttaagtcagacaactgcgaatgcttcaggaccacgtgcaaccgttggcggtattgatggtaagcaagttggacttggggttcaggtcggtgcgatcgatacagacatgggtcaaggtattcaaaacacgactggccgtgctttggacttatatatcaatggtagcgggtttttagtatttgagcgagatggtaataatggtcaggtttattcacgtaacggtgctttgaagatcgatgctaatggcaacttgactaatgctgatggtttacgtgtgatgggctatgctcccggacaggaaggcggagcgttaactccaattacagtaccagctcaaaatgcagctggtgaaaagttagttgaaggtcacgtttcaatcggtcctgatggcaaagttactgcgcgttatggcgcggaagatgaagtgatcggtacagtgtcgattgctacgttcagtaatccagccggcttaagcaagatcggtaacagcacttatgaaatatcacaggattctggtaatgccaataatttagtacctggtacagatgggaccaacactttattagcggggacattggaagattctaacgttgacttagcgcaagaattctctgacatgatcgttacaagcagagcatatcaggccaatgcaaggagtatcacaacgtcagacgagatgttgcaagaattgatcaacctaaagagatagtgagcgaaacaacgcggttaggagacgagcaatatcgggtttagacatcatggtgcgtttttggcaccgtgatgtttaaactggataggcgcagattcctgcgttgagaaactgtcctagaatagtgagcgaaacaacgcggttaggagacgagcaatatcgggtttagacatcatggtgcgtttttggcaccgtgatgtttaaactagataggcgcagactcctgcgttgaggagctgtcctaagatagtgagcgaggtaagccgggtaggactcgagtactaacggacttctaggccataatgcgttttttagcattgtgtgtggaagttggttagacggaaagtcctggcttgaggagctgtcctagaatagtgagcgcagcaatttgatcaaaaggggaaaaagaacctgtaaggtaaaatttttattttatgtacaggataaataatagggggcaggttcatgattttgttaacttcatttaaaggaaaagaattttatttgaacccagatttgatctatcgaattgatgaaaccccagatacagtaatcacgcttgtcgatgggaaaacgctggtagttagagacacagcgtttgaaattagggaagcgatcatagaatatcgtcaccgaattttttctggtgagaatctttttgaagggaataacgagggaaacaatgaagaagaatgaagaagtagaaacaactgaaactaaagcaggtggcatcaaatggggattgcttattgttttagtagtcgttttagcatttggggctagtgctgccggcacgatcatttccggcaagtactttaatagtcaagacgcaaaacctaaagctgaaaaagtgcaaacaggagctgccatttctaaaagacagcgtctggtaaacgtcaaaatgtttattgttaatttggcaacggatgatgcagctgatccacaatatttacgcttaaaggtctctttgttagtggctgacgatgatcaagcaaaagcattaaaaaaagacatgcctttagtgcgtgacagcatgatccgtgttttgaaaccaaaaagggccgcagatttattgaaaaataatcaaagtatcgatgaggtcaaagaacaagtcaaagaggctattaataaaaattatggcagttcaatagtgcaagaagtttatgtgacagattttgtgatccaataagttaaatcatacgaggagtattcaaatggagttaacgttgtcgttgatcaaaatggtggttggattaattatcgtgatcgttttgatcaacttatttttaaaatacttacagaaattcgttgctccacaggatcggcaatttcgagttatcaagaaaatcccagtttcaaaaacttccgcacttgggatcgtgcaagtcatcgagcgctattacttgatgagcttggcagaacaaggcagtacggtgatctctgagttatcaaaagaagaggttgagcaattatttaccagttcagatgatcaagcgagtgaaaaaatagattttgcggccattctcaagcaaaagacgatcaagctgcagaataagagaaagaagtaatgactacgaaaaagcaaagtaaaatactgagcgggttgtccttaacggcttgcttgttccgaccagtttcagtgcatgcagctggcctcgatgatgtttctcgtggcattactgatttgatcaatagtggacagagcggaaattcgtcgcagatcgttaatgtgtttgtgatgatgacgattttatccgtggtcccgctgttgttagtcatgatgacatcttttacacggatcatcatggtcctttcatttactagaagtgccttaggaacgcagcaaaacccaccaaatcaagttttgcttggcttggctttgtttttgaccctgtttacgatgaagcctgtttatacagatatctataaagaagcgatccaaccttatagtcggcaggagatcactgaaaaacaagcattcaaccgttcagaggtcaggcttaaggaatttatgggaaaagaaactcgaaaaaaagatgtcaaattgttcttagatgtttctaaagacaagcatcgctataaaaatgtggagtcagttccgctaacgacacttactccggcttttattattagtgagctgcggacagcctttagtattggctttttgatatttatcccgtttttgatcatagatatggtcgtctcgagtgtgctgatggcgatggggatgatcatgctgtcgccggttatgatctcattgccgtttaaattattattattcgtgatggtagatggctggtacttgttagtcgaatcgttagttcatagtttcagttagagggggagcttaatgtctgtttcattagtcttgatggtcatgcgtgaagcggtgatcagaatcttagtagtttcaggtccaatcgtgatagttgcgatggtcgttggtttggtcattagtatctttcaagctacgacccagattcaagaacaaactttgagttttgtccctaagttggtcgcaatttttgtgaccctgatcttggctggaaactttatgatcacaacgctaaaagaattcacggaatatatcttccgcttgatctcgggggtgtgacgtcagtggccgaagtacaattagttagtttggtgatttgccggatattttcttttatggtcacagcgccgattttatcacaaaaaagttttcctaatactgctaagctgatcgttggggggagtttggtagttgctgccattcctttagttggcaaggtcaaggcgatgagtgtggttatcttcgctttggcggctttaaaggagactttattggggcttgccatgggctatgttagtcaactggtttttcaagctgtgatcatggcgggttccctgatcgattttcaaaatggtttttcgatgggccaggcttatgacaggacaatggaagtttccagttcacaatttggtcggatgtactactggttggcactggcagttttcttcatgttaaatttgcatctggaattgtttcgcgctgtgatgctatcttttacgattgttcctttaggaaccgccactttgacgaatgcaagtgttaagggtgtggtcattttgactagtaagacccttgccatggcttttaatgttgctgcacctttgatcattgctgtgatggtgatcgatattgtattggggatcttgtcacggtctgtgccgcaaatgaacgtgctgatgttaagtttgtctcttaaatctactgtaggaatgatcatctttttgatcatgctgccaaatgtcgtggaattgttgggaaagataatcccacagtcatatgagtatctagtcgagttcctgcgttcggtaggtcaggcatagtctgataaaggaaaggttatttcatggataaagatggtaaaactgaaaaaccgacccctaagcgtaaaagagatgcgcgcaagaagggaaatgttgctagaagtccagacttaacagctgctttggctttattgaccttttcgtttatctttattcctgcttggcaatttggattaggcaagttttttccttatatgacaggctttatcgagcagttggataactaccaggtcttatacgcagacctacctaaggttggcttgcaggcgatcttaacggttttgatcgtggcagcaccattcttggtcgtcggttatttgatcagttttttggggaattttgtgcaaattggttttttatttacggctaaaccattaaagcctgatttcaaacgtttgaaccctttaagtggtttcaaaaggatgtttagtctggatgcgatagtcaacctgggaaaaacgctggcaaagttcttactgatcgcatatctgtgttatcgcaaatacatatctacgttacgtgacattttaaatgctggttctgttggtcctgccaagatcttgttttttattctcaatttttgtaaagaactagggatgcagattgccttggttttgttggttttggggttggcagattttgcctatcaaagtttcagtcggactaagaaattgaagatgactaaacaagagatcaaagaagaaatgaaacaaatggaaggcgatccgaaagtcaaagcgcagcgaaaagctaagtatcaggcgatggtccgcaattcgatcgcccaagttaaagatgcgacagtcgttttggcaaatccgactcatttagcattggccatcaagtatgataagacagaaacgccagtcccacagctgcttgctaaaggagctgatgagatcgccatgaaaatgaaagaagaagccagaaaaaatgatgtaccgatcattgagaataaaccgctggcacgagcaatttatcccaagatcgaggcaggagaatttattccagaagagttttttgagccagttgctgatttgattgccttggtttaccgtttggatgaagaagctaagtataaaatataagcctggttaaagttgaaccggctttgagttgataggagagagagtaaccgatgaaaaacaagcaaaaagcagctaaaaagaatgcgctcaaaccagctgatctgatcgtttcacttttggtagtcagtatcattggcttgatcatcattccgcttccgctgccagtcttggattttttgatcaccatcaacatggcgatcgctatgaacatattattgatcaccatgtttactcactcagtcttggaatttactacttttccaaccttgcttttgatcacaacgatgttcaagttaggcttaaacatgtcatcgactcgtgcgatcctaacacaaggtgatgggggacatgttattgccgcctttgctgacgttatggcagggaaaaactatattgttgggatcatcttgttcgtgatcatcatgatcgtgcagttggtcgttgtgactaacggttccggccgtgtttcagaagtgtcggcccgtttcaccttggatgctatgccagggaaacagatggcgatcgattcggatctgaactcgggtttgatcgatgaaaagcaggctagaaaacgacgggaagacctgcaacgtgaagcagatttttatggttcgatggatggtgccagcaagttcgttaaaggtgatgccattgcggggatcgtcattgttttagtcaatctgattggtggaacgatcatctttactatgaaaggtgatctcagcgcaatggaagctttatcacagtttggcaagctgtcgatcggtgatggcttggtcagttcgatcccttcactattgatctcaattgcctcaggtattattgttactcgctctgataatgatagtacgtttggtaaagatattgctgaagatgcgttgcgcaatccgcaaatattccggatcgtagcggggatcttaatggttttatcccttgtccccggttttccgtttattccctttatggttatggggttagccctacttggtgttagcttcctgatcaaacaacaggatgctaagaaagttaaggaagagcaacaacgaaaacagactttggctttacaaaagaaaaaagatgtccaagaagacgaagatgtagccgatttccaagtcgaaactttagcgatcgaaattggttatgcactgataccgctggtcgatagttcgatcgacaatagtttgatgagccggatcattgctttacgtaaacaaactgctcatgaattagggatcttggtcagtccagtgaggatccgagataacttgtacctggatgcaaataattattctatcaagatcaagggcaatgaggtcggcacgggtgatatttatcctgataaatacatgatctttagtccgactggggatgagatcccgtttaatggcatccaagccgtggaaccagcctttcatttagaagcgatgtggatcaatgaaagtgataaagaagcggctgacctgcaaggattcacagttatcgaacctttgactgttatcgccactcatttgaaggaagttatttactcacatgctcctgaacttttgggacgccaagaagttaagcaattattggaaggcattaagcaacaaagcaacgttgtgatcgatgaattgatcccagatattttacgcttaggagaagttgaaaaggtcctccagaatttgttggaagaaaaggtaccgatcaatgatttatcaactatcttagaaactctggcagattatgggaccgtcaccaaagataccgaaacgctgacagaatacgttcgccaagcattaagaagaacaattgccaacaagtatgtcggtgaagataacaaaatttatgccgttactgtgcatcccaaaattgaagaaatggttgcacagagtattaaaaaaacagcaactggttcgtatcctgttttgcagccggatacggtcaataagatgttggatgcgatcactcagctgaatcaaaaaatgctggtggaaaatatttcctttgtccttttgacaaatccacagactagaactgcgtttagaaagttgttgtcgtttaacttcccagatttggcaattttgtcgttaaatgagatcccaaatgaaatcgggatcgaggcagtcgggcagttgcaattttaggaaggcactctgtgggaaggcgtgttgaagatagctggccagagtatgcatcacattctgacttgtgagaaaaacatagccagagtatgcatcacattctgacttgtggcacaaactatgccagagaaagcgtcacatttcgatttgcgacacaaactacgccaaagtatgcgttgcattatgatttgtgacacaaactatgccagagtatgcgttgcattatgatttatgacacaaactatgccagagtatgcgttgcattatgatttgtgacacaaactatgccagagtacgcgttacattctgatttgtgagacaaactatgccaaagtaagcgtcacattccaatttgcaacacatatttgcaggaacaaggatagaagacaattacttcacccggtattttcagaaaggagcttttttcttgtatgagatgaatatggaagatcaagttatcaaatatttgcctttagttgaaaaggtcatcgctcggatcactgttaaaagctccgattatgactacgaagatctcttcaatactggagtgatcggcttgatcgatgcacttaagaaatttgatccacaaaagaaagtaccatttgaaagttatgcttatgtacggatccgtgggaccatcattgatgagatccgcagtcacggtcggttgtctcgttataaatttgacaatttgactcgctattatcgggctaagcaggaattagagcaagaattgaaacgagaagctactgacaaagaattatgcagtaagctccaaatcaatcagaaaaagctgaacgatatttatgatagcttgcattatatggctagtatctctttggaggatgtcttgttttcagcagaacaatcgcctagcagacaagagatctttcgtgataaaaaaacgggcgatgcacaagaacatttgttggaaacagaaatgaaacaggagttggcagcggcgatcagcaagctttctgaaagagaacaattagttttgagtttgtattacgaacaggaaatgacacttaaagaaattagtttggtcttagacgtttctattgcacgcgtttcacagatccatgggcgtgcagttggaaaactaaaaggatttatggaggaaaatgatgattagaggaattgatactttaagacatagttttaatgttttgcaagctcaacaagaaaatattagcggtaacatcgctaatatcaagacacctggctacctgcaaaaaaatttgtttgaagcaacaatgaacgaggcacagttacataataaccaggctggtcccaaaaatgaaacccgccatgagattggcggttttacatggggcaatcaaattcagggcagtgctctggacatgcaaaaaggctcgcttgaaccgacaggcttggcaacggattttgcagttcaaggcaatggcttttttgccgttagaatgggaaatggtcaaatcgcgtatacgcgtgatggtcatttttcagtgaatgatgccggtcagctgatcactgaagaaggttttcaagtgataggtcgaaatggcggcccagttgatgcccagcaagcacaacaaaatttgatggtggtgtcttttccagcaaatgcacaacttcaaaatgtcggcggaacgctttataccgggcagggagcccagcaaattgatttgccggtccaagctggaatgcttgaaaattctaatgtttctactgctgatgagatggtctcattaatggaaaccgggcgccaatttcaggctcaacaaaaagtgctatcagctactaattcgaccttggataaggcagtcaaccaactaggtcggatctagatcaaatagttggttatttttctcaggcgtacagtgagtcttgatggtacttagtataggcttgagaaaacagatcatgtaggaaatgaggagagtaagtaaaaatgaacttgaattctattttatccattaacagaacaggtttgaacggcttgcaaaataatctggataatgtttcacataacattgctaacgaaaacacagtaggctataagggaatcatcaattcatttaatgagctgatgaataataatttaactaatagcgacggtgcacttggtaattctaatgcaagagttgattcgaatactggtctaaatgccgcgggagcacgagtcgatgatcaagtcggaaaatttgaaacgaccggtcgtgcacttgatatggctattaacggcaatgctttttttgggatcattggtcccgatggtaatacatacttgactaaggcaggagactttcatcgtgatgctaacggtggtttgatcgccagcaacggctatcgggttgcagttgacgcgcgggtgccagaacaaaattggccagcaggggacttgaaagtttcttcagacggaacgatcagatccggtgatcaggttttagggtctttacgtttatttgaaccaaacaacgcacattcattggtgtcagttggtgataacttgtatttagccaatggcggttttagagccgctggggcaggtagtagtgtgatgcaaggaactcttgaaagttccaatgtagatctggctactcaaatgacagaattattaacagcacagaggtcttaccaaatgaatgcccgcgctgcttcatctacagatgaaatgatggagaccatcaaccactttaccgactgatttaggagaaaaaattgatcgaacttaaaaatgtaacaaaaaaatatggcaatgtttgggcaaataaaaatatttcatgcgtgatcgaacaaggtgaatttgtttatgtagttggtccaagtggggctgggaaaacaactttacttgagatcttaagtgctcaacgctccattgattctggtatagcccggatcggcaatattgaaattgaatatttgagaaatgaacagatatacaaactacgccgtcaattggggatcgtttcgcaaaaagacctttttttaccgcgattgacgatcaaagaaaatatggaaacctgtatgtcagcgctagagatccccactgaaaagtgggaagagcggatggcagaggtattgaccagtgtcgaaatgatgctatttattgagcggttgcctcaggaactttcagtcgggcaacaaaagaaaattgcgatcgctcgtgcgttattgaatgatccgccagttattatcgcggacgaacctactgctaatttagacgttaagtcggccaaagagatcatgcaaattttctttcgcctgaatcagatggggacaacgatcattttagcaacacatgacagtaccatggttaattctttgcgtcatcgaactttggaactaaaaaatggagaactgatccgagatgatccagacggtggatattcaagattttctgatccaaaagatgtctatgtttggtaaacggttaaaaaaataaaattttaaccgatataacagattggagtgtcgttttgcttaagtgagtattatgacagataccaaatcttttatatggggaaggaaaacaaatggaaaaacgtaagaagacggctaaaaaagctaactccgaagtagctttcttgccagttttagggacagtcattgttttaattgtttttcgggcttttgttttaagttcggcacagacagcggagatgagaaggttttggatactcgcggtcattgtagtcgctttgcatctcttgtatgtactatttggtcataaaaatacggcagtaacaggaggagaagccggcggattaaaaaaactttctgttcaggtcggtaagatggtagagggagatttcagtcagatcgacgagatcggcaaagttcccggccaaagcccaatgtttattaaaactcgtgaccagttgcttggtttagccaatgcattttcagctttattaactgggatcaaggaagaaactgagcagtcggaaacaatggtcaacgatctaagtggaaaatcgacgcacgctaaaagttcgatcgatggtgtccgtcaagcgatggggactattgctactaatgctggacagcaagcaacagcttctcaaagtacagttgctcaaatgaatgtttttggtgaccaaattgaagagatacgccagaaaattgaaaaaatgaatagctatgctgacgaatcaaagcaaagtaatattcaaaacatggaaatgatgcgccaagtttcacggtcttggaaccaagaaacagaaagtcaaaagaagattgtttctgaaatgacggcgatgaatcaagatattcaaagtattggcaatatcgtgcagttgatcaatgatatttcagaacagactaatttgttggctttgaatgcttcaatagaggcggctcgtgcaggcgaggcaggtaaaggctttgcaatcgttgctgaggaagtccgtgatctggcagaacaatccggcaaatcaaccactaatattagagaactgatcgaatcgatccgtgctaagtctaagaaaatgactgttgatctggatgcatcatacaagggcagtcagcaacagcagatgaatatttctggtgtactgaaggctagcgaacaaatcaccgaggatgtcacgcagttgagcgatggcctaaccgatgttagttcacatgcagatgagatcaaagataaaaaagatgcagtcaataattctattcagcaaatggattcacagatcgctgaaacttctgcaagtacacaggaagtatcggctaacttggatgatttttattccttgatcgaagaactcgaaaaaagtgtcgaacagcttcaacaagctgatgagatcagacgtttgcaaatcggcagtttcaaattaaaaaactagcagcgtcaattcttagttgtagaagttaaagaggggtacaaaaatgggacaatatgttgtttttaaaagtcataagcaagtttttgctttgccagttgaaatggttaaacgagtgatcgaaactgaaaagtttatctcgttgccggaattgccagactatgtattaggtgtgtatgaatatcaagaacagatgttgccaatcgttgatcttagtaagcggctttacggcgaattatcgcctgcaacgctggactataaggtgatcttggcacattggagcgaacggacgatggggatctttgtcgaggagatcgtagggatcatgtcgctgactgagacggattatgaaaaagatttggacagatcatcactgaagcgcccgtatatcagtcaatttttgaagatgggcgatgaagtagtgatcgagttgaacttagattatcttttcaactcttcacaagaagaggagatcatttcatccgtagattccattactgaaaattcagaaaaagaagagaatacggatgatgctgcagaacactaacgaaaccagggtaggaatctctgattataaaatttcatacgcgcctaataaaataatgaccgtggggctaggttcttgtattggaacgatcgtttatgatccagtttcaaaaatcggtggattgagtcatattatgctccctgatagtaaaccgtttgaaaagaacgggacttcaggtttgaacttggctaagtatgccaatacggcgttacccctgatggtcaaagaacttaagcaaaaagcaccacgagctaaatttcaagctaagatctctggtggtgcaaatatgtttggatttaaaaacaacctcacgacagctaatattggtcagagaaatgttgacgctgttttaaatcagttggcaagcctgcagatcccgttagttggccaagatacgggcggcagcagcggaaggaccatggtcgtcgatttaaacgatttttcgaccttgatcagggtcgtgagacaggaaaatagatacatttaaaaactatgtactgttttttaattaacgaaaatttgctcattgatgacttgagaatgttgtttaagagagaaaagtaaagatgtgaaaggattcttataccttatgaataggattttgatggttgatgactctgcatttatgcgcaaagtgatctcggatatattgaataaaatgcccagtgtttcaacggttcgaattgcacgaaacggtaaaaattgtttggacatccttgatgcagataatgattttgacttaattttaatggatattgaaatgcctgttatggatggcttgagcgcccttagacagatcaaaaaggattattctatcccggtcataatgctaagtgcagtcagtgatcaggcagtaaccatcaaagctctagaatatggtgcggccgattttatcgaaaaacctgtgaacctgatggaaattcaagacgagtgggtcagagaactgtatgcaaagatcaaaaatatttgcggacgttctagtaaaccgccagttgctgccaatcataaagccaaacccaacggagcacataaaaagcgtaacatcaggccccaagccgttgtgatcggctcatcaacgggtggaccaaaagcactattagaaattattaaaggtgtgagtcatacaaacattcctgtttttatcgtacaacatatgccagcgggatttacccgcacgttttctgagcgtttaaatgaagaaagcggcgctacagtcgttgaggctagtgataatatgctggtcaaaaatcagatctacttgtgtcctggtaattatcacatgacgatccaaggtgaccggctcaagttagatcaacgtccgaagatgcatgggacaaggccagccgttgattacttgtttgaaacggcggctgctcattatggtgctaatttaacagcttttatcctgactggaatggggcatgatggaacggcaggattgcaaacaatcatggatgaaggcggttatgtaatagctgaagatcaggaatcttgtaccgtttttggaatgccaagatctgcaattgaagctcaagttgtcgatgaagttgtaagtttgcatgagatcgggaaaatactacagatgatcgttgggtgaaattaaaatgttggaagaaaattttactgattttaataggtgggtggagcagaaatatcatatccatctcgatgattataaagaaagacaaatgcaacgcaggatcaaaaatattatggataaaaacggggtcaactcgttgcatgaatatgaacaccttttggacaaagatccaatcaaacgagcggagtttatcgagcatttgacaattaatgtgactgaattttaccgcaatcaagaaatatttagtaattttgaaaaatgtttgttagaaaaagttgctccacaatttaataatttgaaactatggagtgcggcttgttcgaccggcgccgaaccatacaccttagcgatgatcttagaaaaaaatcatcttatgggcaatgttctagcaacggatattgatgatgacattttaaagaaagcacgtttaggtcagtattcgacaaatgagttaaaaaatgtttctgatactgatgttagacgatattttaagtcattaggaccagaccagtatcaaatagggccagccgtcaaacaacgagtttcgttcaagaaacatgatttattggctgaccagtatgaatcaggttttcatgcgataatttgtcgcaatgtaacgatttatttcaaacccatggcacgcgatcgagtttatcaaaaaataagtgaggcgctggtaccaggtggaatattgttcacgggagcaacagaaacacttaacagcgcagaaaagctggggttaaagaaaatagagtcgtttatatatgagaaacaaggtgagtgagacgggagaaagtgagcactatcggacactagattcagattgcgtattttgcgatgtggaactaatgttggataggcggagctttctgtctcaagcaacctgactaagaaaacaaggtggagtgagccggttaaaagtcgagcattagcggactttaacaataagcacagaccattcgtgcttaggtgtaaataatttgaatggggggatcattgatggctgacgataatagtgtttatcgcgatatctttttcgaagaaagcgaagataatttaacacaactaaatgataatattctagaacttgaaaaagaaccagacaatatcgatttgatcaatgaaatttttagagctgcacataccctaaaaggaatgtcagcaactatgggatatactgtcatgagcaagttgactcataaaatggaagatatttttgatcttttcaaatcaggcaagttgaaggtaacaagtgatcatatttctctgatttttcggtgcttagataaattgaccgaacttctagacggcttgcgagatgaagaagaacaaagcgaagatcagatcacagaattatggaatgaattagataaagttgaaaatgaattagatggcggccaaacaaaaaccgctgataaaaatgtagatgagaagaaagctccagaagatagtcagctcgaactgaaatttgaaactttagaagaagctgacttatcagtgatcgaacaggctaaaacacaacatcttaatgtgatcagtgcggcagttcgaatcgatccagagtcaatgctgaaaggcccacgagcattcttagtcatcgataagctcgacagtgaaggagatattattcacattgaaccggctcctgaccagctggaagaaggcaattttgatacagatttcaaattgttgatcctaactgaaagtaatcaagatgacattaagaagatcattgaatctagtagtgagatcgctgaagttttgacggcagaattcgatgagaaaactcaaaaggcagccgctgaagaaccacaaaaagacgcacaaccagctgttgacaaagaaaatactactgagaaaaaaagcgctgctcctgaacctaagaaagcaaaagccccgtctaagaagagcacttcgcatcaaaaaaatgccaaaaatcagtcgatcagagttgatctttctcggttggatacctttttgaatgttgtatctgagttggtcgtttatcgcaatcaactagaagatgccaatagtcgccaaaatttagaagaagtgcatgaatctttagaacaggtttcacgcttgacatctgaactgcaggatttggttttgaaaattcggatgcagcaagtcagcgttgtctttagtcgttttccacggatggttcgcgatctttccaaccagttaaataaaaagatgactcttgaaattgagggcgaagaaactgaattagataaaactgtggttaccgaactcagtgagcccttgatccatttagttagaaattcagccgaccatgggatcgaggatgctgaaaacagaaagaaacttggcaaaccggaagaaggaaagataaaattatcggcttatcaagaaggaaataaggtcatgatcactttgagcgatgatggtaaaggccttgatccacaagtccttaaaattaccgctgaagagcgtggaatcgatacgaccggtatgagtgataaagagctgcaaatgttagtctttaatcctggcttttcaacggctaaaaagatcactaacatttcaggacgtggggtcggcttggatgctgttcaagctaaaatcaacgaactgggcggttcattggaagttgacagtaaagtcaatgtgggtacgaaaacagttatcaaattaccgttgaccttgtctattattcaggcactgatggtcaaactaggcgaagaaacatttgctatcccgttagatgttgttgaacgggtcgaaatgatccatgaagataatattttacaaactgctagtcaggaagtctatcctttacagacaggattgacaccagtgatccggactgccaacattttgaatatccctgaaaaggatcagggaaagaaatatatgatcttgatcaagggtgataataaagactttgggatcgtagttgatgaattgatcggacagcaagaaatcgtaatcaagaagattgatccgatgttgcaaaaaatcaaaagattccaaggcgcgacgatccttggcaacggctcgatcgcattgatcttggacgtcaatacgatctgtaaagacgcacaggtgggttaagatggcatattcaaacatacaattagatgcgttaaaagaagttatgaatattggcggcggcaaagcagctacaacaatatcacaaatggttggcagtgtgatcaggatgcgtgttccagaagtcaatatcttaagttatgacgagctttaccagcaagttatggccgatgaccaggaagtttatgccgttttaagcagcatccatggtgacttaaagggtgcgatgctatttgttattacggacccggccgctaaagagatctcaagtttgatgatgggaacagatcaaggtgtgaccgaagaaattaaggtttctgcagttagtgaattgactaacattgtttcaagttcatttttaacatcgatcggcgggatgctggaaaagaaattaaaaccagaagttccggtaagttcgtttgatatgtttggtgccgtgattagtagtgcatatatggaatttgaacagtttggtgatgagatcatggtgatcagaaatgaatttacttatgattctaattacttggaagcttcactatacttcatcccagagttgggtgtaattgacaaaatgataaaatcacttggagtttgagaggagaatgtcgcgtggcaaataaagttttgatcgtcgatgacgctgtttttatgagaatgaaattaaaggatattttagaaaagaacggctatgaggtcgctggagaagcgcaaaatgggcaagaagccttcgacctttatcagtctgagaaaccggacttggtaacaatggatattaccatgccggatgtggatgggatccaggccgtgaaaatgatcaaggaatttgatagcagtgcaaaagttgtaatgtgcagtgcgatgggccaacaaggaatggtcatggatgctatcagagctggagcagtcgattttatcgtcaaaccttttgatactgatcgggtgatcaaagccttagataaggcattgtcttaattaaagttctattgactgaatttaattaagaaagggagtgtgttttaatgcagatgattttgtttaaaatgaatcagcaacattatttgatagctgccgaaactgtagaagaagttgttgatacggttcaaattaccaaagtcccgcttgctccgctttgggtcaagggcttgataaatttgcgaggcacagtgttgacggtgatcagcttggcacagttagtaggactgccggaatcaaaaacaaaccgaaatattatgataatgaaaaaagatgatgaacgtcgtggattattgatcgatgaagtgatcgaagttgtggatgttgatcctgatgatattcaactaagtgaagatcaagccgccctttattttaccggtgtggtagacttgggtgaacaaacgattgctgatgtgatcgacgttaatgataagattttttaattgtggaatgaactaatgagcgagaggaagtgtctttgtggatcaggtgttatcacagcaggaaatcgattcacttttaaatgcctatgattcgggcgaattagacgaagaagtgatcgatgaagagcaaaatgacgaatcacaagcgaagccatacgattttagaaggccgacacggctatctaaagaatatataaataccttacacatgatttttgaagacttcgctaagatgagcggcaatgttctttcaaatatcttgcggactaacttggatatgcaattagcatcgatcgagcagatcagttatgacgaattcattcattctatcccacgtgtgactttgattggaatgtttaaagcagctccccttaaaggatcacacatgatcgaaatcaatccccaactatgtatgactttagtcgaattgttgtgtggcggtgctgatttggagagtaatcggaaaaatcaaccgcctttggataaaaatggttttacagatatcgaattaacattattagatgaggttatgggtgaattctctaaaattttgcaatcagtttggaaagaagtcctaacacttgatgttgagcttgaatctctagaaacaaatccacaattactacagtccttatcgcctaatgaaccagttgtattagctactttcacagtacagcttttcggagtttcaacatttattaacttgtgtattccttatgtttcattcgaaggtatcctagataaattgagtttgcataattggttcgactcaagccaggaattaagtgaagatgaccaaagcgaattaaaacacgggttaaacgcaatagatctgccaatggaagtcgttttgggcaacacccaaatggacttggctgatttcttgaaattagaaccaggtgacgtcatcaagctggactctaaaatctccagtccgttagatacgtacattgaagaccgaccgttttactgggtcaaaccagggaaaaagaatggacaattcgcaattgagttattgagcaagatcgagggggaagaagaatgacggagagtttaacacaagaacaaatagatgctttgatgaatggcagtgatgctcaagaagctgcgcaatcagatgatgaagaattattggaggggttagatcgccaaggggtcaaagacctgatcggtgaagttggtaatatttccatgtcacaggcagcaacaactctgtcatcaattctgactcatcgtgtggcaattacgacaccacgtgttaaaaaaatccattttggtgaattactcgaccagatccatgcacccaaagttgctacgaccgttgaatttcgtgaaggtttagcaggaactaacttaatgttgctagaggtcagtgatgcaacggttattgctgatctgatgatgggtggcgatggaaagtcagcttcagaagaatttactgaagtcgaattaagtgccgtgggtgaagcgatgaatcaaatgattggttcagcttcgacatccatggctactatgatcaaccaaaaagtcgatattcttcctccaaaagtgcatttgtgggaaaatcccggcgatgtgaatgaagactctttggaccgtgaggaagaaatttattgtatttcatttaacttggatgtagaaggactgatcgagagtgaaattatgcagatcttttctttggaaatggtcaaagatattgtgaaagcaatgatgtctgacaaagcaacagttgtcaaacgtgatgcggagaaaccagcagtcgagaaagccaaggctattagtaaaccacaaccagctccgcaacaagttaagatcccgcaaaaaccaagcaatgaacaaccacaaagaaaggcgcaggtcagtaacgtggaaatttctaaacccgaatttgaagaattgtcgagtcaccaagaaatcagcggtgataacttagatttgatcttagatattccattaaacctaagcgttgtcttggggcggactaaaaagactgttcgagatattttgaactttaacactggttcagttatcgaacttgataaattaacagacgaacctttggagatcatgttgaacggaaaattgatcgcaactggggaagttgttgtgatcaatgaaaactttggcgtgcggatcaataagatcatttctcaaaaacaaaggatcaataaaataaattaagttaaaaaaagttgaacttttaggtttaactttttttattttggccgataactgtatttgtagagtcaaaaaggaaaaaggaggcattcacatgaaaattaatcgagatatttcttcaatcaattcacaaatgatccaaaactactatcacaatcaagcctcgaaaacaacgaaaaagggtgcaccacaacagtttaatgttaaattatcagatactgctcaaagattagtaaacaacgctaaaaatcgtgatatagacgatgatgtggatgcggctaaggtcgacaaaatcaaacagcagttggcaaacggaacatataaggtctcaccagaaaagattgctgatcagatgttccaggaaatgaaacaagaaggaaataaagatgaatgaaaaggcatttcaggctaagcttaaattatttatcaaaatactgaaacgtgaacaaaagtttttagttcttgatgacggagaatcgctaaatgaaattgttccgcaaaaggaagatttcttaccgatttttgagaagtatactggtgaaattggcgacaaaacaaagatgctgattcaagaaatccaagagttgcaagaaactaatttattgttgacgcaacaagccttggcttatcagaaaaaaatgatggatacgatccaacacagcttggaaaaacaggaaaatacttatgttgatcagcataggactcaaagtcaacctaagcgagaagatattcctgcggcaatcgtagatcagtcattttaggttgtagaaggggtgcgtgaaccaaaagtctgtgcctatccaacttcgccaacaagtcgtaaaccacgacttattgtcaaagtccgatagtgctcaacttttatgcggttcacttcaccttgttattctttaggaggactttcatgtcaggtttatttggtactttgaatactgctcgcagtgggttagatgctaaccaaatcggcttgcagactagcagtcataatattgctaatactaataccgaaggttactcgcgccaacgtgttgatttatcaacgaagatcccttatgcaaaaacaggagtcggtttgatcggtagcggtgttcaagctgatggtatctcacggatcgttgatgactttgtacgttcacaggttcgagattctaattcagattacaattttaacgtccaaaagtcagatgttttggctttattagaaaatgcattacatgagccgtcagacgatggactcattacacaattgaataattttgctgacagcttacaaaagttagccgacaatcccgagttggatacggctaaaactaatagtgttcaaatgggtgttgctttagcttcttatatccagcaaactgcacggcaagtttcacaagtttctactgatacacgttcttctttggcgaaaactgttctagattttaatgaaaaggcggaacaactcgctaatttgaatcaacagttgtatgacagtcatttaagtgatgaacagcccaatgatttgttagatcagcgcgatagtttattaaaggatatgtctgctgaaagtaatttaacagtttcgtttgacaaatatggccgtgcttcacttagtatcggtgaccatgcagtggttgacaatgaaaaaggagtacagactaagttaaatgttgttgtcagtaactctgacggcaaagctcagattttgccaaatggtgatgaaacacaaccaaagcaaacgatcgatggagacttcacggtcggagaagtcgtttttgaaacagcgaacggttcaggtaagtatagcaagttagcagttaagtcaggttcgatcggcggtttgcaagaatcattggctgaagtggaaagccatcgagctgaattaaatgattttgctaaaggcgttgtagaaattgaaaatatcgtttattctgacgggcaaactccagatagcggcttttttgaaatcactgatcccagtgatccggctttaagtattaagatcaacgatgatttagtcgcagatccaggcaaaatgaaagtcggtactggtgatgatccggccgaaggagataatggacgtgctttagcgatggctagagctttaaagagtaagcttggttatccggtcgatacagcgaatttgctgaaaaattataataaagatactttgaccttcaataattctaaagagggtttaacgatcccaggtgcttacaacagtattgttacaaaaaatgggatatctaaacaaaaagcagacaatatggcatctgctcaattatcagcgttgaatcaattggaatacaaagatcaagcagcttctggtgttaatttgaacgaagaaatgtcagatgtgatcagatttcaacaaggttttcaagctaatgccaaattgttaaatgtcgtttcagaaatgttggatactttgatcaatagaacgggggtttaatcaatgagggtttccagtaaaatggaatattctgatttcttgaagaatttacagatcagtactaacaaggttcaaaagacaatgaatcaactgtctagtttgaaagaggtcaataaggcttctgataatcctttgttagtcgcaaagatcttagatctgaatgtttcgatttcacaaaacaaaacgtatggccaaacaatttctgattccactcaatggtctcaaacgcaagactcggctttagataatgtttcgaccttgatgcttaacattagaaatttgatcgagtcatcggctaatagcgggacaactacacctgccgtttacaatgcgaaccgtaaagaaatctcacagtcgatctcagggatagttgatgccttgaataccaactatgatggcaggtatatctttggggggacaaagacacaagagccaccatttgctgttattaaagatgctgaaggggcagctgtcagtttagaatacagaggcaacgtggataatttacagcgcgagatctcagatggtgtcagcttagatttagctactgatggttcacgtttgatgcatgccgatggttcgtctggcattgataaagatagcaagtctgaactgaccgaattctttagcggtttgatcgatactctaaaatcgggagacccagatagaaagttatccagtgaatatttgtcagggatcgataaatttactgaaaactttactgactatagatctaagatcggttcgatcgaaaatcgtttaagttcagcatcagctcggaataaatctgagaaaaatactttagcagaaactttgtctaataaacaagatgttgatgttgcagagaagtatatggaatatcaaaatcaaatgattgcatatcgttcgaccttggctatggggactaaggtcatgcaaacctcgatattagattatctgcgttaaagttatattttgttttagtggggctaaaggggtaaaagagcagtaattgctcgttaatttgatgacttcagcgcaagcaaaagcaaatactggcaaacatattatttaggggttgtttgcttcagtacttttgtgaacgatagtcatgagatccttagggggtcaaattagatagttagggaaagatggggaaagaaaatggcaaataagaaaaaagttgctaaaaagagtattcagaagtatattttaccgttactcttattgatagcattggtaccggcaattataatgaatttgatctcatatgggaatacgcgtcagcaattgattgagaaaaatgaccgtttaaaagtgacggctgtaaatgttttgcaacggcaacaagttgacatgcggcaagatgttactggacaaattgctagtttggaaaaaagaccagagttgaccaataatgtcaacttaaaagacgctaacagaactttgaaaattgccaatggcgacgctcagggaacgatcacaaacttgatgtatgtcaatactgatggtacatatgcctattcaaattttgcggtgcctaaagatatgaatattttagatcaagattggtatcaaaaagcacctacaggacatgcatattggtcaattccttatgaagatccggctaatcattcgtatagtgcaagtgtttcccagaaaatcatagataagcaggggaaagcccatgttttagcaattactgtttcatattcatcagtacaaaaatctgttgaatcgatggaaatcggaaacaatggtcaagccgccgttttaactaaagccggcagggttttgatcaaaaagaacactggtaaaagcaataatacttttaaagcaggtaaaatgatcaacaagacagctgtttataaagcagtggctgcttcagcgaaaaagaaggggacgatcaaagttcctggaggttcgcagatcaataaggttacctttgacaagggcaatggcacaactgacaattggaccatcgctcaaatgaacaatagtgatttgagcgcagaaacacatcatatgttgataaccttgacgatctcaatgttggcgatcatcattttagccgtgataatatcttactatagtgcaggttttatcaaacgtgctttattaatacttgagaagttctttatagatgctggccaaggtaagatgagttacgtgcctgcagtgggtgaaaaaatcgagtattctaaggtaccaatagaacgtctagctcaaaagatgaccagagctgatgcgaatggacatgagtttaacagagtagcggctagttacaataatatgatcgcttctgtcactgttctgatcggacaaacacagcaagaagccaagaatgtttctgaacaagctgcatcattacttgacctttcgaaacaaacaacaactgcttctgaagaaatcgcacagacgatcactgaaattgctgaagtgacaggatcacaagcaaaagaaactactgaaagcgtggaccatgttcaaaaaattactgcacatattgataatgtcaatacgaacatggaagagcttgctaattcatccaaagaagcttcagaagttgggcaaaataacttggatatcatggacaaagtcaatggtaactggtcaagcgagatcaacggaatgcaagctttgatgagcagtgttcaggaaatggatagtgatgtacaaaacattactaagatcattaacgttatcaatgatatagcaagacagacgaacttgcttgccttgaatgcatcgatcgaagcagctagtgcaggcgaagcaggaaaaggattctcagttgttgcagcggagatccggaagttagctgaacaaagtaatgattcgactaaagaaattgagtcgatcattgaacagatcagacagcaatcaactggtttggtcaagacaacaacagactcactggaaagcagtgaaaaacagactggtttgatcacagaagccatcaagtcgacaatgaacgtttataagcataatgaagctatgggtgcaaatgttcaaaagatccatgagggtacaaaagagatcagtgaaactcaaaagatgatcttagataaacttgaaagcatctcagcttcaacacaagaaaacgcagcaggaacagaggaagtttcggctaactctgaagaagtgcaagctacgatggatgagcttacccaacatgtttcgaccttggaagaaactgctgctcagttgcaaaaactgacgggtcaatttgatttagataactaagcagaaagctgagaagctggccaattgcgagtccgttattaaatagcaaaaagttaatataagagaactgcaaacaaaaaagatcgttcttctttaaattgaaggacgatctttttgcatgtagttaattattttgccaactaatgatcagtgcttgtggaccgatgaaggaaaatatcgaaggtgaatatagatcagttactagttgaagttgcggcataatttctttcaggcaagaaacatatttttccaagaccattgtattatctgccatgattgttagcttcggattgcttgcagaactgtgaaacttatttaatagcgccgttgtaatttttttcgtgcgcgaacttttcatcaggacttcaagttcaccattttcggaaaaatgcagcaaggttttataatgcagcatattattactgaagagatgtgcattatttgaaatagaaccgattcgacgcaagtttttgagattttccattataaccagcgtatgttgcttttggcggtacttggtcaggtctgctaaaatgtcagcaattttcaatccgtgagtaatcagagtaagtgctcgtttgaccaacgcaccttctgcaggaccaagagtatgagaatcaaagagatggatcttaagcggctgttgacagtttttggcgaaagtagagagatttgagcctaagccactgatcgaactggcaatatgtatacaaagtacgtcagtataaccagcttgttgaagttcatcggttactgcagaaattgtggttagagggatctgctcttctgttacagtgttaagcgtggcttcccttagcgtttctattccagcaacttctggtaattcattgggataataagcttctccatccaatgaaagtgggatctgtaagaccctaatattcggttgtgatccgactttactgctgatcatcgcagcgctgtcagttaaaatagcgattttcattagtaatatccattcattgtataaatttcgtgggtcgtgtcaaatatttgttaggctagacagttagttgatccacgatttttagcgactagttactcggttgttaaaatgtctaataataaaattataacatgcttttcaggttgataaacggtcgtcttttttctatacttgaaagtacagtattaatggaataattacttgttacatggtggttcgtgaccatcccacctaaaaactaggagattcttaaaaagggcacgtcttaataataaagttgctgagatcactaaaacagttttgattgctgcactttatgtagttttaacgtttgcttttacaccattgagttatagaccgattcaatttcgtttgtcagaactgctcaatactatggtggttttcaacaaacgttacatgaggggtgtttgattgctaatttatagtcatcaatggggccggaatgtcataggcagtcgcactagaattacatctggtcagtgaagttttgttttggatgacatatttgacagtcggcattggtgaatttgttgtggttttaattggcgacattgttgtgtggctgatcaatgaaaaagttgatctaagccggtaaaagtgagcgtggtttgcaaataaagaggtggcaatgatgctgacattcctgtttatattatgcgtcctttttgtgtggagcgttttgagcttctttttcaacatcggctgcggttgcttgttaggagtcatatttttactaataataatcctgaataattcatatctttaacagtttttctttctttgcctgttatcatcttgtttgtccgtgatccaaaccaacaccttttaggtgtttaattgcgtatacaaaaagagcacagcctgtgctattgttaagtcgaccaaaaccaacacagaacaggagtgctccatatgtcgactttacaacaacaaaccgttaacttcaacaaaaatctggttctttctaataatggtggtcatttatctaacgatgcgggtctaattttagtggctgaatttatgcatcagatccactttaagcgccttttgaaagaaactctccattttaaggaaaaccgcaagttctataggtaccataagaaccagctgtttaaacaactgttgattcagctgattgcgggttatttcgacgatactgccgctaataaactgaccgcagacatgagctttgagcttgttttagataatttagttgcttcgcaaccaactctttcacgctatatcaaccaaatttccgcagacgacttggccgggatcacaaaattagtcgccaagttagcgcagttagtgatcacacaaaagaagcaacgtcaactgatcattgatcttgattcgactcattccgatacatttggttaccagaaaggcagtgcttttaacacccgttatcaaacgaacggttatcatcccctgttggcttttgatggtttttcgggttgtctcttaggagctaaattacggccaggtaacgaatacacttccaaaaatgcggaagcttttttgaaaccgctactgaaacaatacgctgctttagatgtactagtccgggctgactcgggttttgccaagccagaaatttatgccgcctgtgaagaagctggggcaaagtttacgatccgtctcaaggctaatccaaaactacaacggatcgccgagcacttgatccatgtggggcaacctggggaagacttcgccgaaaaagatgtccagtggcaccgtttgacagattaccaaccggacacttggggtcgcgcttaccccgtgatcattaaatcaactcgccctgctggcgagctactctttaaacacgaatttatcgtgactaacttggagctggcttttgccagtgacgtctttgaactctatcaccaacgtggagccatggaggatctgatcaaagaagttaaaagtggctttgcctttgataaaacggatagttccagttttacggctaaccagtttagaatgttactcgccggtgtggcttataacttagttcaagccatgaaaaaactggttttcccagctgaattagggaacgcaacgagcgccactttacgtttcaagctctttcatttggccggcagagtcacccaacatgcacgtaaattatggctgcatctttctagtaccaatgtttttgatgatttatactggcaaacattgtttaggattcaagaatttcagctcactagtaattaaaaaagacaatttaaaaaatttaagtacgatcaagggagtagtttactcttttgacaccaatcaaaaataaaattgtcttaaaaatagctcaaatacactcaaaaatagttgcggattaaatttgagctaaattaaacgttaaaaggggcaaattacctttacgcaacaaagtatgaattattcaggattatttgtaacgcttacattttaagcggtatacttaagtaagtgaaacataaaatcatcaggaggtctttattaatggtagcacagaaaataaacgcatcagatgcaatgttaaaagtcatggcagactggggaattgaccatatttttggtttacccggtggctcgtttgattcaacgatgaatgcactacataaccagaaagcgattatgcgttacattcaagtgcgccatgaagaagtcggtgcactagcagcggcgggtgaagccaaagcaactggcaagattgctgctacatttggctcagccggacctggtgcagtccacttgttaaatggtctctacgatgctaaatatgataatgttcctgtattagcattagttggacaagttgctacgggtgtgatgaatacggattatttccaagaaatgaatgaaaaccccatgtttgctgatgtggcagtctataatcggacggtaatgacggctgaacagatgccacttgtagtcgaccaagccattcaacaagcctataaacaccgcggcgtagcagttgtcacgattccaactaacctaggctgggaaccgattgaagataacttcgaggccactgcaaacttattccaaatgggcaattatccagagccaagaagcgcggatattgatcgtacattacagttaattaaagatgcaaaacaacccattatttattttggtcaaggtgcacgtgctgcgggtgaagaattggttgctttatctgatcggttgagtatcccaatgatgtcatcagccctttcaaaagggattgttgccgatgaccatccagcttatatggtttcagctgggcgagtagccacgaaacccggagttgatttggcagaagctgctgatctaatcttatttgtcggtagcaattatgaattcggtcaatacttcttcaagccagatgccaaatttattcaaattgatatcgatcctactaaactaggacacagacaccatgtggatgtcggaattttagcggatgctaagacggcattaaaggcattgctagccgcgagtgaaccagttgccaaaaaatctgccttttataaagcagcactcgccaataaagaaaactggaatgaatggaaagccagttttgaagaagacgatcaaacaccgttacgtgtggaacccgtcttcaaacaaatcaatgagatggccactgacgatgccatctttaatctcgatgttgggaatgtttcaatcgatggggtgcgtttcttgaaaatgcatccaggccaacgtatgacgttatcagcatggtatgccacaatgggttgcgcagtgcctgcagcaatcgggacccaggctgcctaccctgaccgtcaaatctggtcgattagtggtgacggtggcttcacgatggtgatgcaagatattatcacgcaagttaaataccaaatgccaatcatcaacgttgtattaagcaacgattcattcggattcattgaagctgaacaagatgataagggtcaaccacactcaggggttgccattcaaggggcagattacggtgcagcagcaacagcgatgggcgcaaaaggatttacggtacggacattagctgaattgaaagctgcttttgctgctgctaaaggcacgaaggaacctgttgtgattgatgttaaaattgctaacgaacgtccgttacccgttgaacaactcgtgattgatgatcaaacacaggatccagcagaagtagcggcctttgttgaaaaatatcatgcacaaggattgaaaccatttcggacgttcttagaaagttaagcttttttaaatcagactagcgaccgataaaaaataatgttgaatgtggtaaattataattaaaattaaccttggaaggaattcagcggatgagtagaacaatttcaagacgcttaatcagcgcaacgtctctcatggcattaatcggaagcatctcattggctatttattggtctcggcttggtctttttaataacacgaccgcgttgcaggcgtatttggggcactctgtgctaattggtccgctgattttcatcacgattcagattattcaagttgtgattcctgtcattccaggcgggattagcaccgcagccggggttttggtattcggcccactttgggggtttgtttataattacgtcgggattgcaattggttctatcttgaacttcttattagcacgacaatttgggaagccgttcatcttacacgtcatcagtgaaaaaacgtatgacaagtatatcgggacaattatggaaaagaaaaactttgtgcgcttcttcgcacttgcgattttcttaccggtcgcaccagacgatgtcttatgcttgatggctgggctcaccgagatgtcattgaagaaatttacatggatcattattttatgcaagccagcttcaattgcagtgtatagttttgcgctggtgtatggcggtcaattcctaatgcaattaatgtaaaaaaaggcccaggatattttatcctgggcctttttttgcgtgtttaggcggtttttctctttaacccgatgccagtaacggcactgagaattgagaagattggtgataagagactgaagaaacaaaatggaaggtaactcaaggtagggacgcctaaagtattagcggcaaaaacgccagcgacgccccatggaacgaggtagttgataactgtcccaccatcttcaagggcgcgccctaaagcaagattactcaagtttgatttttcaaaggtgctcttgaaggctttaccagggagaatcacagaaaggaattcttcaccgataaagaggttaacgccaatcccagaagcaataacggcgctgagcaattgacctggcgtcttaagatgggtagcaagaggggccatcacgcgttcgattaaaccaagcttcattaagaggccaccgagggttaaggtcaagataattaaggcgacggtgcttaacatgctattaatcccaccgcgtgagagcaaggcatcgatacttttatcgccggtgtgggcaacaaacccattttcaatgtaactcgcaattttagcaattggtgtgtgtgggttgtggaaaaagattaaaccgattgaaacggcaatgtttaaaaagagtgttggaattgctggcattttaaggcgagcacaaacgaaaattaagatgattggaattagtgcaagtaggctaactgaagtgtgcgtgtttaagacagcaaccgtcgcaccaattttatcgagggagacatttttcgaggtgtggccaatgatagcgtataaaattaatgagccaacaaacgctggaaccgtggtccacatcaagttcttaatatgttcaaatagatctgtttcagtaaccgctgcggttaagtttgttgattgtgaaagtggcgatgacttatcaccgaatattgccccggaaataatagctgcggccacgatggtagtgtttagtccgagtgtggctccaatcccgaagaaagcaatgccgacggttgaaatgacggtaaaggcgctcccgatggcactgccgacaagcgcacagacgacgaaaatcgagggaatgaaccagtggacactgaccattttgaagccccagaccatcaggctaggaatcacaccggcggcaatccagatactgattaaggcgccgacgagaatgaaaataatgataggaatgattccgcttttgagaccatcttcgataccagaatgaatggcgtcccagctaaagtgccgccaacgggcccatagaatcaagagggcaatcgccgttaagacgggtgtttgtggtgaaagttggaaaacaatcacgccgctacccatgatggctagcagaataagtaaaacgatacttgcttctaataaactagttttgtgttttgtcatttaaatcgcatccttttaagtttaatggttaggctggtgcgacaaaagactgataacggaggattcccccgcacgatgcaatcttgaacatgaaaatccctccatagttgaaatgtgtttttgattggcaatgttctatgcaaatgtttagatattaagcgctaaatcacgcactctacaaaaaaagtccctactcgctgatgcgaatagggacgattggaaaccgcggtaccacccagttaacgtgtcattttaaggtaacacaccactcttacaggtgataacggtcctgttaattagccgaatcatccattcagtatttcgtaacaattaccctgatcggttcgcagcaaccaccgactttctgacacccagataatgcactacttagtttgaattaagatgacttatgattgttattcaatttacggtagttcgaattaaaagtcaagcatgaactttagaaaaaatttgtatcttgtaaattgtaactgtaatctaactggtaagaatcgcttggtaatgggacagtttcagcaaaacgctgctcgaattcgtcgaggggcaagcttgtccacagacgaaaactgtgatcatcataagcggcccagtcacaaattttagttaattcgggataccgttgtaaatcaggaacaggtgtctcaataaagtgtaaaaaataatcataggattcggcttgttgagaaacggtcgaaaataaatggaaataatcgcggaatgtcatcggtatgctcgctttctacaagagtaattaatcgttattagtataaactgaaaaagtggtataccacaactttggcgcttttgtttaatggaaacataagaatttacttggcgcaacactgtaagtgggttactatgagtgttgatatgacaaaggagttgttccagatgcagattaggactgccacaactgaactacggcattttcaaccaatggatcttgaagtggtctatcaaattggttgtcaaaaaacgattgtgacgcagctaaatatgacggcttttcaatctcaacaagaagcgcagtcgtttctaacaatgttgatgaatgatgaggatgcttgggcgattgttgatcgcgcaacgcaggtggtgcaaggattgataatgctcgcccctacccttagtgcggatggacaatcagtcgcggcatatgaactcagttttgccatcttaccggcatatcaacgacgtgggattatcagcgcagtattgccggcaacgatgcaagcctatgcgcaagaaactggtgtaaacacctttaatgcggcctgctttttaaccaaccaagcatcgcaagcgagtttacagaaaattcagttcgagaagacttatcaatcacaactaccggattatttaggcgggcaacgagttcagtactaccgccgaatagtgaacgttttcaaattgtaaaaataacatggttataaccgtaataaatcacggtttaaatgagaaagctatggtataatcggtttgaaagacaaatgggggggtaatcaaatggcaaacgaaaacgaccaagcctatgcacgaaagttagcgcaaattgaggcaaacgaaaatttgacgattctatcaagtatgaatcaggttaatgatgaaaaggttaagcagtacatcgtctatacagactatcgcgaaaatggtcaacaagaatcgacaagttcgatttttgtctacacaccatacgctaatgtcgaccgctttggacattcaacggttgattttcaagcacaactcttatttgaaaccaataaatggaaaaaagaaatgcacattacagttcttgaaacattaggagcagcttcacgcttagctgtttatgatttccaaaatcttggtttagcacaattggcagtgaaagccttctgtaatttagcgaataagttggaaattgaaacaattgatggtaatatcagtacgttcgatagagatgattttaagaaagttgcacacattcttgaaaaatatgggtttgaggtacaaaccgacgcaggtcaatcctctggttcattcactaagacgcgaaaggcgtagtgcgcgactgttaaaaaggggatagggctaatgcatttaacacgggcgtttgaacaagcaacttgtattatcgtacttttggcgacgcaagatcctgaacacacaatttcgtctgaagtcattcatcatcgcttaggcgggtcacagacttacctacgcaaaattattcgtaagttagtagtggctgggctagtgaaatcggcttctggtaatagtggtggttttacactagcgcggccagccgatgaagtttcaatctacgatgttgtgttggccacggaaggacaaattaagtcttatccagatacgggtaagttggatacggtcttcaatgacttccaacccgttgctaaacaaggaacattgattattaacgctgcgttccacaaggcggacatgctatgggcgaacgagttaaaacggcaaactgtttctggcttgattattgagacaattgggcaccaagccattccagtgattgattggaatcaatcagccgaacaacgtgaattactcatccagaagatcattaaaaatttaaaatagagtgaaagcaatccggttgttggattgctttttttgtgctggaattgaaaattagttttcaattgattagttgatagtttcagaaaattgataatttatttaaaaaatggacaatggcatatccaattaacgccgtaccacttgttaacaaaggattaagattaatagtgaagaaaataattaacaccaaaattaaaaatatatatttcgcgcgttttataatcaagttagccaaatacttttagctaattgataaaataaaaaacaccaagacaaatctctgttatcattgatgttcctacacaaacaatgaaagaggttattgtcttgatgcaagaacagaataccacagtcagaaaaaaaggtcagcacctaacttcgtttgaacgaggcagaattgctacgctgcacagccaaggctattccaatcgtgcaattgccagagcgcttaatgtttgtcatcaaacaatcaataatgaattgtgccgcggcgagatcgaccaagtaaaaaaagtgaatggtcaacgccaatattacgctgtatactcaccagaaacagcacaagctaagtacgaagctaatcgagcccactgtcatcgacctttgaaactcgtcggtgtcgctgattttatcgactattttacgactcatttgcgtcaagatggttggtcgcctgatgcagcagtaggacgggccaaacttgaaggcttatatcaacctgaggagatggtctcgaccaagacgctataccactatattgatgcccagttacttgaagtccgcaatcttgatctactcgaaaaaacgcgccaccgtgccaaacatcatcactcgatcaagcacaagcgtctggccggacggagtattgatgaacggcctaaaagtatcgaccagcgccaagagttcggccatttcgaattggacaccgtggtgggcaagcgcaacggtcaagagagtgtgatcttaacgctgatcgagcgtcaatcccgctgccaaattctacgtttgatcgatggtcgtgatgccgattcagtcaactatgagctggccaagatctgtcaagaatacggatcaatcatgaagtcagttactgccgataatggcgctgagttctcggaagttggcgctgtacttaccggtgtcgctaacctttattatgcccatccatctcgttcctctgagcgtgggactaacgaagcgcataatcgaatgatccgccgcgatgtacccaagggtctatccatggatattttgggtcctcatgatatccaagcagttgagtcaaagctaaacaatttaccgcgccggcaaactggctatcaaacacccaaagagcttttctccgctgcttccgccggttaagttaagtccataaaatatgaatattaatgaaaatactgatttaataggatttatcgtgtggctaatttgttcttgcaatttggggtttacattttcactataaactcatctggtttttttgtaaatgctttcatttactttaaatcgacacaatttcgtgaaaactgtcttacattagtaactacgggaaatcttttgaaaataattttttcacaatgaaaggattttataaaggtatagggccttaagtaattgtgtaagcgatgaaagaatgactttggtcaaagttgaagttttacttgagattaaaatcgatggtctacctgaatttgtcggtaaatggagggatttcgtggtaaacttcagatggagaagcttgccaataaatgaaaaaggaaacgctcatgattacaataaaagatattgcgcgtcaggctggtgtctcagtctcaaccgcctcacgtgcgctaaataataattcaagaattagccttaaaacgcgtgaacgaatccaaaaactcgccaaggatcttgattatctgccaaattataccgctaagaacctgactcgcggtgaagcaaacgtcgtcggagttatttttccaacggtggaaagttcctcaccggagaatccgttctatattgatatgctccgaggcatcaatcagtcgctagtcgcccgacactatgttttatcaattgcgattgggagccgagttgaagaggtccttgctaacgtgacggccatggttcaacaggcaaaggtcaaacggttcgttctactatatacggatgagaatgatccggtcgttgactatttgcgtcgcgaaaatttggactttgtggttattggtcagccagttggagatttgccggatcgatacgtcgataacgacaatgttcaggctgggcgagatgccacaatggcaattcttcaaaatggcggggttcgaaacccactatttgttgaatccgaatatgagtggcaatacgagcgaaatcgccgaatgggctacgaaaaggcgatggcggaagtccaattagaaccgctagtatttagattaccaaaacgcgtttctgaaacagcagtcgaggtatttttgaatcagcaccaagatgtcgatgcggtaattgcaaccgacaatgttggcttgctgcggtttaatcgggtttggagcaaaattcgacacacaaagaaaattccgatgatgagtttcaataagagtgagctactagcgttgattgaccaagatgtccgcatggttgatatgcggccggaaatgctgggcagtcgcgcggtagaattgttatttaccgatcgaaatgttcaaaaattaattgtgcagtacgagttgtgagcaacaactcttttttattttatttttgtgcaaacggttgcgcaaattatcaaagcggtttataattcattttgttaagaaaaatgggttcacataacccaaataaacagggggtgacaaatcatggaaaatgattcagcacaaggcaacacggctacaacgccaaaaaccaagccaatgccaaaattgtctatcgcgacaatttggatgattagtttcggattcttcggtgttcaaatggctttctctttacaatcttcacaaatggggcggatcttccaaactttgggagctgatccaaccaaattaggtttcttctttattcttcctccactagcaggtttagtggttcaaccattagttggctattattcagataaaacgtggatgcctaaaattggtcgtcgattaccttaccttttgatgggatcgttagtcgccgtcatcgttatgttcttactaccaaactctggtagcttaggatttggttatggatcacttgcagcactttggttcggtgccatcacaattctcttcatggatttatcgtctaacgttgccatgcaaccattcaagatgatggtcggggacatggtgaatgatgagcaaaaaggatttgcttactcaatccaaagtttcttatcaaatagtggttcagtgctagctgcaattttcccatacctcttaactggtttgggtgttgctaacattgcgccaaagggtgtcattccgaactcagttattttctcattctatacaggtgccgttatcttagttatctgtagtgccttcactattttgagagttaaagaatatacacccgcagaatataacgcctatcacggtattactgaagcagatgttcaagaaaaagttggtttatttacacttttgaaacgtgctcctaaagtattctggacgttaactcttgttcaattcttctgctggatggccttccaatacctttggacttatggtgcaggtgccgtcgccaagaacgtttggcgcgcaacagatcctgcaagtgctggctatcaagccggtgccaactggttcggtgttctatccgcaatttacgctttagctgccgttgtttggtcattagttcttgctaagatgccaaatgacaagcacaagccaatgtacgcaactagtttagtattaggtgccgttgggtttgcctcaattttcgttgttcataatcaatgggttctcatcctctcattctgcttgattggtatttcatgggccgcaatgatgatgttcccattcaccattttgaccaacgcactttcaggtgccaacatgggctcgtaccttggtctattcaacggaagtatctgtttaccacaagtcgttgcttcagtattgagtttcgctttgttcccattgatgggctcatcaatgccagggatggttctcttagccggtatcttgatgttagtcggtgccttctcagtaagcagtattaaagaagtattcgcataaaaattaaaggagtatgaatgatgaaacgaacatttgacgtatcaccgtggcacattgtgaccactaaacttaatccagacgataaacgtcttcaagaatcaatgaccagtcttgcaaatggtaacctcggcatgcgtggattctttgaggaaggttacagtggcgacacgcttcccggaatctacattggtggcgtttggtttccagataagacaaaggttggctggtggaaaaacggctatcctaagtactttggcaaagtgattaatgcaatcaactttatcaaggttggcattaaaatcaacggtgaagttgttgatttggctaaggacaaggtgagtgacttcaaccttgatttagatatgcaacaggccgttctcgaacgggctttcactgttgaaaagggtggcgcaaaggttcagatttcatttgaacgatttgtcagtgctgcaactaaggaactcgttgttcaagggattatcttgaagaatgtgggttctaaagaagctaaggttgaattcagttcatccgttgatgctgatgtacaaaatgaagacgccaattacgatgaaaagttctgggacgttttgaaagttgctaagactgataatgaagccgaagttattgcggaaacaaagccaaacgactttggaacaccacaatttacggttggtgctttatcaacagttgtcacggactggaacagtgagtctgcagaccaaaccgatgtctcagcgacgaaccattttagcggaacactggctgctggtgagcaaacaattatccagaagcgcacagttgttgtgtcatcacgtgacttccctaaacaagctgatcttgaggctcgtttaacccaattaaataaagaaatttctgcaacatcatacagtgatttattcaacgcccacaaagctgtttgggcaaatcgctggaacgtttctgatgttaaaattgctggcgacgatgaagcgcaacaaggaattcgttttaacctattccagctcttctcaacgtactatggcgaggattctcgtttgaacatcggacctaaaggctttaccggtgaaaaatacggtggtgccacatactgggatacagaggcctttgcggttcccgtttaccttggtgttacggatccaaatgttaccaaaaacttgttgaagtatcgttaccaacaaattgacggtgccttccataatgctaaggaacagggccttaagggtgctttatacccaatggttacgtttgatgggattgaatctcataacgaatgggaaattacatttgaggaaattcaccgtaacggcgacattgcctacgcaatttacaactacacaaactacactggtgacaagtcatacgttcagcatgaaggcgccaaggtcttaacggagatttcacgtttctgggctgaccgggttcacttctcagaacggaatggcaagtacatgattcatggtgttactggccctgatgagtacgaaaataacgttgataacaactggtataccaacattttggcacaatggacgttgaaatatacgcttgaaattttgccagaggttgcaccagaagttgctaaagacttaaacgtcactgacgctgaaaagaaacagtggcaagacattgtggacagaatgtaccttcctgaagacaagaagttaggaattttcgttcaacacgatggcttcctagacaaggatatcaagccagtcagctcacttcctaaggatcaattgccacttaaccaaaactggtcatgggacaaaattcttcgttcaccatacatcaaacaagccgatgttcttcaaggaatctgggactttattgatgactttacacctgaacagaagaaagccaactttgatttctatgagccattaacggttcatgaatcaagtttgtcagcttcaatccatgccattttggcagctgatcttcattatgaagaaaaggcaaccgaattgtatgaacggacagctcgtctcgatttggataactacaataatgacacggtcgatggtttgcacatcacagctatgaccggtggctggttagccattgttcaaggattcgctggcatgcgagttcgcaacggtgagttacactatgcaccattcctacctaagaaatggcagtcataccagttccgtcaattgttccgcggtcgtttgattgaggtaacggttgatcagtctggtacgaagcttgacttgctcgatggcgacccaattacggttgacctcgatggtaagaaggaagagcttaaataggactaaaaaaagggcaagagtgggaaactgctcttcgccttttttattaaaagaaagtgggtgagactggtggaatcgactgttaaagattttggccatttagaaaatggtgagttagtcaaagaatttacgattacaaataaaaatggtgtgagcctccgcacaatcagttacggagcaacctggactggctactttgtgacaccagagaagaatatcattttaaattttgataacgtgcacgaatatgaaacgaatccctttcatttaggaaacaccattggtcgggtggcaggacggttgagcggccatacgcttaacgtcgctggattcagggtcaatttgaagccaaacgaaaataaaaatgtgctacacagtggtaacacgggcattgatcggctcaattggcatggcgagattattctagacgaccaatctgccaaaattcgatataccatgcaacagaaagcaatttttcctgggacgttggaaatggccatcacctattctttagatgaggataaccatgtttccgtacaatatgagggacgcagcaacgtggaaaccctatttaatccgatgacgcatgtttactttaatttggatggaccggacgcgccaatcaaggatgaattcttgaagatagttgcggataggcatatcgtggtaaatgaagaaaagattccaacgggtgaaatacaggtcgttgaaaataccccgtttgattttacaaaccttgttaagctgggcgatcaatgtgaaaaacttggcggcaacgaacagtttgatgatgcctttaaaaagccggatacatcgctaggcgtaacaccaagcttgttactagttgatagcgcaaagcagcatcaattagaaatgggcagtgatcgcaatggcgtcattatttttaacgtcaatcccgattgcattggcaaagatgcggattggcttgctgctcatccagataacggactggctgtggaattacaaacggtcccagatgcgattcaccacgacggatttggcgacattgttttacccgctaatcaaactaaaacttacacatcaacttattactattcggagggataaccatgaagtttgaagatattaagggatttgcatttgatttggacggcgtcattgctgatagtgcccgattgcacgctaaggcatggcaccaaacggcggatgaagttcattcagaatggacaccagaactagcggaagccttgaagggtgtcagccgcatggattcactggaaatgattttgaaggcaggtggccatgaaaatgactacaccgaggatgaaaaggtggctttggctaccgaaaagaacaccaagtatttgaagctggttgaatcattaacgccagatgacgtgctaccagggatgaaagccttcttagacgaattaaaagctagcggctataaaatgtccgtcgcttcagcctcaaagaacgcccctgcaattttgaagcagttgaaaattaccgactactttgaaggcgtggttgatccagccaaattgcatgccggaaaaccagatccagaaatcttcagtttggcggccggtgtgatggacttagcaccagaagttgttgccggtctagaagattcaggtgctggcattaagtcaattaatgctgcgggtgaactttcaatcgggattggtaatcaattgatggaagcggatgtgcgctttgcggatacgagtgaagtttcgttaaaaaatattaaagctaaattaggctaatcattgagccggcactgtttttagggctctctgtcaaatcctgttgatagatagttttacagaactagaagctaagcggcttctagttctgtttttgtatttggttttgttctcgtttgttgaagcttaatccgcgagattaaatgatggaaatttctaaatccaaacgcagtccgctgaatctgcttaatcatccgattaataccttcaattggaccgttagaatacttagattcactggcattcaagacaatttccagattacttttaaacgtttttagtgtttccttcatttgaaaacttaggttttcatttttgtagagatagtagacaatgccatctttgtcatgatttttaagacaggacatgataccttgcagcgcatcgtatgtgctcgaaatagtgtcatcagtgtcaagctccatttgtactcgcccttgttgagttaactgctgtcgtaaatgacgatcatagaaagtttggctgacttctagttcatcaaagtgcttcaaatatagtttccatgagaacttaagcagtcgatattcgatagatttcttgtcatattttttcattgtctgaactctagtctggttgaatgcccgcgtcatcatggcgataatgtggaatcgatcaacgacaatttctgcgtttggaaacatttccttaacgatatctttatagtaactattgagatccagagttacggtttgaacccgttttcgggtattgatatggaatctattaaagtactcaataatgctttttttacgcgcgttttataatcaagttagccaaatacttttagctaattgataaaataaaaaacaccaagacaaatctctgttatcattgatgttcctacacaaacaatgaaagaggttattgtcttgatgcaagaacagaataccacagtcagaaaaaaaggtcagcacctaacttcgtttgaacgaggcagaattgctacgctgcacagccaaggctattccaatcgtgcaattgccagagcgcttaatgtttgtcatcaaacaatcaataatgaattgtgccgcggcgagatcgaccaagtaaaaaaagtgaatggtcaacgccaatattacgctgtatactcaccagaaacagcacaagctaagtacgaagctaatcgagcccactgtcatcgacctttgaaactcgtcggtgtcgctgattttatcgactattttacgactcatttgcgtcaagatggttggtcgcctgatgcagcagtaggacgggccaaacttgaaggcttatatcaacctgaggagatggtctcgaccaagacgctataccactatattgatgcccagttacttgaagtccgcaatcttgatctactcgaaaaaacgcgccaccgtgccaaacatcatcactcgatcaagcacaagcgtctggccggacggagtattgatgaacggcctaaaagtatcgaccagcgccaagagttcggccatttcgaattggacaccgtggtgggcaagcgcaacggtcaagagagtgtgatcttaacgctgatcgagcgtcaatcccgctgccaaattctacgtttgatcgatggtcgtgatgccgattcagtcaactatgagctggccaagatctgtcaagaatacggatcaatcatgaagtcagttactgccgataatggcgctgagttctcggaagttggcgctgtacttaccggtgtcgctaacctttattatgcccatccatatcgttcctctgagcgtgggactaacgaagcgcataatcgaatgatccgccgcgatgtacccaagggtctatccatggatattttgggtcctcatgatatccaagcagttgagtcaaagctaaacaatttaccgcgccggcaaactggctatcaaacacccaaagagcttttctccgctgcttccgccggttaagttaagtccataaaatatgaatattaatgaaaatactgatttaataggatttatcgtgtggctaatttgttcttgcaatttgggaaaatatatatttgctgaaaacttattattttattacataaaacgtactctgaattagaaggagtagcgaatagaatgagacgaatgaagcaacgatttggattgttattagcggtggttgccacttttgacctgatgttgatggttagtcatcaaccagttcaggcggagaaagtgacttattcggttacgcccgtctatcctgataatcaaacggatacggagttgggctattatgatttaaaagttactcctggtcgaaaacaagaagttggtgtgcgggttcaaaatagtggaacgaaaccaattacggtcgatgtgacccctacgacagcgacaaccaatgaaaatggattgattgattatacaggaaccaatactaagcgagattacccgtcaggaagttgcaaaatataacgataaggccgttgaattaccagagaacaataactggtggttatatgtcattatcggtattatgattgtcattatcctactattgataattcttttatggcggaaatcacgcaaagataaagaacaataagcaaaatgaaaaccacgattgaaataatcgtggttttttaatggaaataattgacgtggttgtgtgaattctgtatactcatttctaacaagataagaggtcgcaaaaaccatgagtcgttatcctgaactgactaagcagtaatgagggataattaaaggggaatttgccgaaatgtcaatttgcttattcattttgatgttgggacttggttgaataaatcaaggactgtcgtaacgaaatgttacggggcgctatcaacggatattataaggctatcagtctttttgtcgtttttagcagacaaaaagactgtttttttgtttgctagaacgtggttggggctttttcttgaaatcatagagaaaagagcgaagtattatggcaggaaatgaaatgaagcgggagttaaagacgcggcatctttcgatgattgcgttgggcggtagtatcgggacgggcttgtttgtgacaagtggttcagcaattgcaaaggcaggtccaggtggtgcattgttagcctattgtgggattgggattatggtcttcttcttgatgaccagtttgggtgaaatggcaacgtacttgcctgtctcaggttctttctcaacctatgcaacgcggtttgttgatccagcccttggttttgcgttagggtggaattattggtttaactgggcgattacgttggcggttgatattagtaccgcggcactcgttacggaattctggcttcctgatatgccagggtggatttttagcttagtcgcactattattaattttcttgattaacatcacgagcgttaaatcattcggcgaaacggaatattggtttgcgttaatcaaagtgattacggtcattattttcttaggtgttgggttactaacgattctcgggattatgggtggccatcctactggcttgagtaacttcacttataagaaggccccatttgttggtgggttaccaatgatgttgagtgtcttcgtcgttgctggcttctcattccaaggcaccgaactaattgggattacagctggtgaatcaaagaccccagaaaagagtattccaaaggccattaaacaagttttctggcgcattctgctattttatattctttcaatcttcgtgattgcttgtttaattccttatgatagccactcattgttgggcgcgagtgaaacgaatattgctgttagtccatttacgttagtgttcaaacgagctgggttagcttctgcagccagcatcatgaacgcagtgatcttaacatcagtgttatcagcggcaaactcagggatgtacgcttcatcccggatgttgtggtcaatggctgaagatggctatgcagctaaaattttcgctaagacaagcaaacgtggcatcccagtaatggcactgattggtacaacaatcgtaggagctttaacctttgtgacaagtatttttggaactcggatttatttattcttagtggcagctagtgggttgactgggtttattgcttggttaggaattgctgtgtcacattatcgtttccgtcgtgcgttcaaggcacaaggtcatcagttgagcgaattgaaatatcatgcacgttggttcccatttggtcccatttttgcattcgtgctttgtttattggtgattgcagggcaagatattcaagcctttaagaacttcgattggacagcgattgggattagttatatgagcattccattgtttgtcgtactatatgtttactataaagtacggtacaaaactaagatgattccactagaagaagttgatttatcaaaacataaatagcgtgcggcttacggagcacgtttagattacaaaaaggcccgacaatttaagttgtcgggcctttttgcgttattgtagcgagcgttgatcaccagctttgaaatattgttgataaggtgttaatcgttgcttgaagagctcgttgactgtcacgaaatgtcgtttttgagcagtttgttctttagcaattgcgggtaatgccttaatcgttgcctcacttgtgtgcagtaggacaagatcaccacctgtaatacgctcatttacatttttggcaattgtcggcgcatcaatatctaagcgccaatcttccgaatcaacactccaagcgattagtgcccggctagcagcggttgttaattccgtactaggggtttcggttgtgacccgtaataagtgtggcaattgaccactggctttgaagtaggcggcatcggtttgcttgaggttatcggcaatttctgacgtgctcattgtatccaagtcatcatcgttgttatacgcttgggtgccaacgacatggccagctttgagtaattgcttcagttgatccggatgttctttagctgctttaccagtagtgaaaaaggttgctttgatgtttaaatcgtttagttgattaatgacactcgtaatagtgctaggttttaatgtcgtattaaaggtgagtgcaatctttttagcaccaccttttttggaaggcatttgattgtcttctgggacaaggttgggattgaggtatggaccaaccgttgccattggcagggcaattgtttcaatatcaagaggattctttgcgaatttcaatgttagaccatctgttgtaaagtcaaaattggttgcttgatcatttcccgggaaatcaagtgcttccaattgtgtaagttgttcgggggtataatcatgggcttgtaattgttggttaattgcaagttgacgaatcatcggaattgttgtgctatctttttgtaaatctttaaacgaaaccgatgttgtattgtgctgcatatcatagatggcttcagtcccagtttgtgaaaacaagcgttgataacgggttttaaaccgtgattttacaaaaccataagcctcggcggttggcttaaaagcatacgtattgtcttgcaagttcttagcagtataactgacgtacaatgtgatatggtcaatgtcgggtgattctttgtgtgcttttgcataaagctgattaccgagtgcgacttcttgtttttgtaaatcgatattggccccattttggttttgtgggacaacataatagatttttccatgcggtttggctacagcgtagattttaaaggccgcgtactgaccgcttgcttggtcattaaaatcacttaaagttgactgctgcatattcttttgcgactgtttaaactgctctctcataaaatattggttctcaaaatacataatgggtattaagaagagtgtcagaacaatcaaagtccatttttgccaagtccgcatgaatactatcctccagtaagtttgtttatctaaatttagtatactgaatttaatcgcgacttgaaagtattattcgtgaactagtctacatacccgatgctccgatttcacccaatcatgataaagccgtttttggtcagggccacgattttccaggcattcaggtgcctgagattcgctctgtcacattagctgatccgggtgccaaaaatgcacagtctgtaaaatcgaatggccatgcgcagtttaattatgcggatggcacactgcatgcggccccgcagtacgggattacaggacaagtcgacctagttaacccgcctgattcttttgggttatactatcgtgttaatgcagatcaaaatgcagtgtggcaaccggtgataaccgattcgcagttgcatttatcggagagctttatggcacagctaattaatgctagtcagaatcagacagggaatccgactactacggagcaagggctgcattgtgatgtcatgcggacaagcgacattgagtttgcgttgtctgaaaaggcggcaagtgcacctattgcaaatgatgatttaaatccaattgataaattccaattcaaattaactttaaacggggcagtagaagttggcatcccgaaaacaattacgtttgatgacgaaattttgggtcaaagtaggggggactaatcggacgattgcgctaaatgaggtaccaagtgtacaactaaaagtggcagataatggtacaccaaaagcgccgaaagtagtcgtatgtaatccgttgtgtagtcattttgatttacaactaggctatctggggataaatcaacgacccaataatcccttttatatgcaagaaaattttaaataccgcttaaatgatagtgatgcaaaagcattaactaatgagtcacccgataatcaatggattgatgggattctacagcggccaatcagtgagcaagatttaacgagttatggaaccacagttggttggaaacaaagtcagttgcagttatcactaccttataatgatgcttatcagattggcccatataatgctgatttgaaatggcaattggtgatttaagttattagcgtgttaggtttaattagagctgatgatgaaattattttcagcttttgaggcggtgtgtgttaataacgcatcgccttttgttatacgcaacaaatatcgctgtagaatggttatgctttaatatcgattgatggtaaaatatatatcaattatttggaacaaggggttaggcaatgtgggtaccaatagtgtttatttaacatcggcagaaaaagataagtatgctcttttcttagatattattaatgtcaaatgggatgaattacccattagaaaacgaatgagcatggctaaaaagggcgaagcactaatcgatgacgtcaatttgaagcaagtggcaacattgttagaccgtaattatagtagcttatacaatacgtatgtcagtattgttggggatctgcaggcaatattagggacggaggaagatgatgttaagcgactcttcgcaattccaagtgatgtctatcatttatatttagtacaacattctgacatctatgatttcgtacagattctattgcggggcggggatatatcgtttaaaaccttcttagcagagcatgatagtagtaaagcaactgtattacgtcatttgaagcaagtccgcgatctaacccgcgccttcaacttacgggtttcatacgaaccaatccggttggaaggtgatgagaagacaattcgattggtcttatccgccttatactggttggcgtctggtgggcatcaatggctatttgaagaaatcaatcacgaatgtgttttgtcggcctttgactatgtctgtgatgaatttcaattgcaaaagcctaacctattaacgcgcgaaattggcgccacgattctggcagtaacttattatcgagtgatggccggtgcagtcgtgcagcccgatgaaaaattagcaactattcggtatccctatactaatttaatcagtgatttacttgcagccgatttcactaaagaatcaacgggattacgaacttgtttggcagagttaacgttaacggaagggcgttcagaagccgctggactattcttcttgttacggtattgtccagtaccgttacgctcaataacaagtactaaggtgactgctgattgggcagatgaacgttatataccagaaattcatcgttttgtgactgcctttttggagcgtattccattcgatattatgcatgagttagagatttcgcagcacacatatgatattttcaaaaatgcgttgttaacgactacggtgacgacctatatccttgggatggacgcgacctctgtcgtttttaatgaattagtcattcgtatgccgcagctaaaacccaatgaactactccataaaaaaattagtgataccgtagattacctcttattcgaaccagcttttagttttttagcaagtgggcgggagaatttgataaaggcttactataatttaattcaacaagtcatccagcagtatcatcctgtaagccaggtgaaggtcgcactcgtgattgagcaagattacattggctatatggatatcttaacagcactcgataatatcaaatatgtcgctgttagtacgaccgatgaagctttacgggatgcagacctgattgttcggacgtcgagcattgccttacccgaaaacgttaatccggaggcgttgtattttacgtggcgcttaaatgctagtagcgatcactatgcccggctgtatggcattattcatgaattatggatgcaaaaaggtacccaagcataataaaaaagccgttcgacaatttgtcgaacggctttttttgtgcaattaggcacccatatttgcttcttgttctgcgtttaaggctttcacccgttcgtcaatcatttcgatgactttttgacgatcagcttcgttttcaacgaagtctaatttgtcaccatcgatttgcatcttgggactttcgtcataggcttcataccaagcatcataacggctgtttaattctttataatagtcgtagagggttggatcggcttctagttgttcgtatgaacgaccacgtttttgaatccgtgaaagcattgtttcgaaactaacgcgtacatggattaataagtcagggcgtttcttgtgggcagcaaatggcaattcttgcatcatgttggctaataattcgtcgtagacacggacttcggttgcggtagcgcgaccaagatcagcgttcaagtggaagagtaatgaatcttcgaaaattgaacggtctaagatgttgttatcatctgtatatgcttgtttgatactatcaaatcgtttgtttaagaaatagatttgtagtaagaatgcatatttagttggatctttgtagaataatggtaatacttcattatcgtctactgattcgtaaaaggcttcagtgcctaagtgatcagatagatatttggttaaactagtttttcctgcaccaattgtgccagcaagtacgagcaatgtcatcagtctccctcttttgaccataaaatgtgtttaaattattattgatatacaacatatggtgttttacaaccaaacgtcacttaaatattctagcatttctgacgtaaaaagcaatctttgattttaaacaacgcaatagttactatttgcacaatttatggtaggattaattactaattataagtctagtggtaataagtcaagaagataattgatataaatatcgtgtaattttacaaaattggcaacactaaactaagcctacttaaaattcataaaaattttagtaggtattccaaagatttgcgtgaataactacgttattccttcaacacactctttggtggtgtgtaaagttggtgattgcgtagtagcgcatcaaccaaacgcacaaattttctggcggttaaaacaatagctcggcggtgcttatttatcggggtttcggtatatttctttttataaaaagctgtgtattcaggtaagtgattttttaccgagttggcggcttcaactaagtaataacgtaaataatgattaccttgttttgttagtggtgtgacttctgactgataatttccagattgtttaactttccaggatagaccggcatatttggcgacttttgcttgatcatcaaatcgttcgatttgaccgacttcagctaagatacctgcggcataaaccttaccgattcctggcacactggttaagcattgatattcaggaattatttcaactagtttttcgatacctttatcaatttgtttaatactttgctgtaatgaacgcatttgaactaccaaggtactgagaataatatcaatcgactcattcattaatcgcggcaactgatagctatttttaatggcacgctgaatggttttaaccagtttttcaggatttttaaagttactgcggccaacattttgaatcaattggacgaagtcctctagtggtaaattggctaattcatctaatgagtagttttcagtcattaaatgtacaattgtggcgctaaaaatgccggtagattctgattttaattccttactaagcgtattacatttataagttaagttttctaagaaatgttgtttaaccgttactaattcggtaactagttgatatctagtacgggttaaacgttgaagtgccatatatttttcttctttgataggtgacgttgtaaaacgttgaattcgtaagtagtcagcaattcgcatggcatcattggtatcagttttgtcttcatcgaagacacgagaatattgcttgattttaaatgggttttcaacagtgactaccgttggtagtgcatttaagtctgcatcttcttggaaaaacatagctggatgaaaactatatagtgatgttgattccataccaatcacaatctgttcaaatgatacttctgcgtgatgttttaaaattaaggctttaatttcagaagcaccatttaaatcgttagcaacacttaaacgatttaggattgataagttactatcatcagtcataaaacaagcatcaatcttttcagaactaatatctaaaccaacaaataatttcacaggaaggacctcctttcgagagttatttggaacttgctttgatactgcgggattccccagaaaatctttacacagctacaacctcgcgtaacagaattttgaccaattggacttatgccgccttcaaactactacattgaagataagcctgattgaaaacagctagtgagttgggagagagcgtaaagactcgggtaacggacttactaaagtagagttaactacaggagtttttagcaaattcccgatagatccattccatggtcctattatattctgaagaatcccgcagtatcaaagtaataattaaattttattgtaagccaacggcttataaatatatcttacgaggatttttactagggggaatcggtttgaacgcaagtgagagtatttttctaaccaagcggaaaatgataagtacgccttattaatggagattgttggtttaaaacgggatgagttgcctgttaaaaagcggattgaactatcgcgtaataatcagccgctcgttgaagatgtgaatctaaaacaagtagcaatgctattaaatcgcagttacggtagcttgtacaatatgtacatgagcattatttggggacctaaaggaaattaccggaccggatgttgatgatattaaaaccttgttcagcgttccaacagatgcctatcactatttattagtgaataagtcagaagcgtttgattttatcaaaatcttactcaagggtgagaccgttacattccaagaattctgggaagcccatgatacgagtaaggcaactgcgctacgccatttaaaaggggtgcgcgacttaattcgctcatttgatatccgtatgtattatgattcacttcggttagaaggcgacgaaaataaaattcatttagtcttaacgatgttattctggatggcaacggaagggcatacctggacctttgaagatgttaaacgagacgatgcacttaaggcgttcgatgttgcgattgatcggttccaattggaaaaaaccaatattttgacccgtgaactaggggcgtattcaatcgtcataacctatttccgattactacaaggtcacacggtttcaactgaactagatggcgattttatccgttatccagttcccaatatggtttctgaatatctaaaatagccctttgaagaccaagctttacggatcaagagcattcttgcacaaatgacccaagaagaagcgatggctgaatcattcaatatatatgacatcattaattttggaccgattcagattcaggatgctaatccctacatggaatcttacgaaacgcgatacaagcggtatattccagtgatttacgagtttgtagaagcttttattgatcaaattccatttgacatcaagaaatacctaaacttagacgatgcgaattatcaaggtttcgtgcaaacgatgatttcgatgacgatgaccacttacatgtttaaacaagatgtgacatcggtgctcgctgaccaaatgatggaaagtgttgaatatctcaagccaaatgatgtcctaaaacaaaatattgatgatacggtggattacttattaatcaatccgaaagtgtcattcttagtcaaattacgtgaagaattggtcagtggttactacaacgtcttgcgtcagatgattcaacggtttgcaccgatgaataaagtgaaggttgtcgttgtgacggaacaatccttcctcgggtactttgatttgatgactgcactgaatagtgttttgtatgtggatgttagtcaatctgacgcggatttaatggatgctgatatggtggttacgacttcgatcattgatttaactggcatcgttaacccagaagcggtgatgtttaaatggcatcaaaatgcagatagcgatcattttggacgtatgctcggtttattacggggtctatggattcaaaaatcatctattgatgattgaatttaaagattaaatgcggtattcttacattaagaagtaaacacgtgaataagcgcctatatggattgacagagagataccggttggtggaaggtattgaatccagcattccagcgcaatagtgggtagtgatgaactacacggttcctggccgttatcagtaattgagggcacctattatttgtagtgggtgaacttgggtggtaccgcgaattgaagtcttttcgtcccaattaagggatgagaaggctttttttattgttgttaattaaagatcattaaaaggagagagtgcaatgttagatattaaagtcattcgagaaaatgtccaatgggcaaaggataagttagctagccgcggtgttcaagctgcagaaattgatgaggtcatcgcattagatgaaaaacgccgtgccttaattgtgaagaccgaagaattgaagaaaaatcgcaatgctgcttcagaagccattgccgttgccaagcgcaataaagaagatgcgactgaacaaatcgctgccatgaagaatgttggggccgaaatcaaggctttggatagcgaattggctgaagtgaaggccaaagtggactacatcttagtccgcttacccaacttcccagatgattcagcacccgttggcccagatgaaagttttagccgtgaagaacgcagatggtcaacaccccgtgaatttgattttgaaccattagcacactgggatatcggtgaaaaattaggcatcttagactttgaacgcgccgctaaagtatcaggtagtcgctttgtttactataagggtgccggtgcacgtcttgaacgggccatttataacttcatgttggatcaacatgctaaagaaggctatgaagaaatgattacgccgtacttagtgaatggcgaatcaatgtttgggactggccaatttcctaagtttacggaagatgtttacacaatgaccaacgaaggcgaacccatgactttgattccaaccgccgaagtgccattgacgaacttctaccgcgacgaaatcttggatggcgcacaattgccaatctacttcactgccttatcaccagctttccgttcagaagcaggaagtgccggccgtgatacccgtggtttaatccggatgcatcaatttaacaaagttgaaatggtgaaattcacgaaaccagaagaatcattcaatgaactagaaaaaatgaccgccgatgctgaaaatatcttaaaagcattgaacttgccatatcacgtcatcacattggcaactggcgatgccagcttcacatcagctaagacatacgatatcgaagtttggttaccagctcaaaatacgtaccgtgaaatctcaagttgttcagattgtacagacttccaagcacgccgcgcccaaattcgttaccgtgacgaagatggccacgtcaacttggtgcacacattgaacggttcaggcttagcagtcggccggacagttgccgccatcttggaaaactatcaaaacgaagatggcagcgtcacaatcccagaaccattggtaccatacatgggtggcatgacgaagattgaagcaaaataattaatttaataggaagtcatttgtttcttccataagggagacggttgttatataaataacgaccgtctttttttgttagattagaaacagttgtgaatagagaatagtttggcgcataagacttgaaatttaaatgaaaaaaggttagactaatttagttatcgtggatattgaatgtaatcaattaagcaacttatataattaaaggagattttagcatgaagatgatccaaaacgaatttaagttcattgccaagaatcgtttaatcatgatttcgttaatcgcaatcgtgtttattccattcttgtacagtatctttttccttaaatctgtctgggatccttatggtagcactggtgaattaccagtcgctgtcgttaataatgatcaaccagccacttacaacggtgaaacgttgagcgctggtaaagatatggtaaaagaattgaagaaaaacgaccaacttggttggcgtttcgtatcagcaaaaaaagcacaacaagggcttaaagataaggaatactacactgtagtgaccctacctaagaacttctctgccaatgctgctacagtcttggataagaatcctaagaagatgcaaattcaatacaaaaccaacgattcattgaacttcatcggtgaagttatcagtgaaatgggtgccaaggaattgaacgcccaagttcgggaaactgtcacaaatgcttacgctaaagtgatgttcaaacaggttaagactgccggtaaagggttcagtactgctgccaagggtgctaaacaattaacagacggttctgtaacgttatcagatggtttaaatgtttatacagccggtgttgcccaagtcaacgatggtatcatgacgatgaaaacaagtgttgtgccattatcagatggtgttaaacaattagctgatggctcaaacacacttaacaacggcttactattgttagatagcaagacgggtgcactcgcatcaggcgcaagccaattagacagcggtgcaggtcagttaaacgctggcttaggaacgtatgcaaatggtgttggttcattaaatgatggtttgacgcttttgactagcaacaacaaactaatcaatggtggagtttcgacgctagcatcatcaaccaaagatttacctgctggcgtagccggtgtctatgtgttgaattctgtagttagtcagaaccttggtgtaattgattctcaattacaggcacaatctgcaacaatgcctaaaactatgcaatcagtgaatacacaatcagcagagttgaagaaaatgttgaaaccaagtatggaattattggtacaaatgaatgctgtttacaaggcaaatgctgcgcaattgtcgcaacttggtcaactagggacgcaacttaaagaatttgaagcgaccttaacagattcagcaacaacaattgggaataattcaatggcaactgccgctgatcttaaagtgattggtgccgaggcctctaaattaagtccagaagcacaaaaagctttgggcgatattcaaactaaaacggaatctaatggtaactctgttaaggcaattcaaacagccagtgctaaattaaatattgatcagttaaaagggatgattgatcaattgacaccattattaagtcaaatgggtaatttggatcagtctattgcacaattgacaaagatgagtcaaaaagcaaatgcgttacttgagacaagtgatcagctaacgaacactgctatgcaaaagcaaatttcagatttatcaacaggtatctctcaattaaatgcagctgcaacacaatctactggtattgcaacgcaattaaaccatggtgttaatggcccagataataccccaactattgatgggattgctatttcaaaagaaaatgcagatgagcaaaaaaaaataattacaaataaagttgctgctattactaagaactctgcaatgacttcacaaattaatacgttggcatcaggaattaagacatatactgatggaactgcgacagctgctgctggcgctagtcaactaacagctaataacgggacattgctagctggttcatctgcacttgctgccggtactggtgctttaaatgcccaagtacctcaattgacaagtggtatcagtcaattggctactggttcaacagccttgaacaatggtcttggtcaattaaatggtcaaattccaacgttaacaagcggtgttgatcaattagctgctggtacaaatcaattaacggataactcagctaagttaacagatggtgctggtcaattaacagatggtaataagacattagcatctgcattgaaatctggtgcaaatgaagttaactcaattcaattaacggataagacagccgatatgtttgctgcacctgctgaattgaaacattcaaattacagctatgtacctaactacggtcatgccttagcaccttacgtcctttcagtagcattgttcgttggcgcaattgtcttcaactttgcttatccaattcggaagatctcaatgactggtcaatcatcaacagcatggttcttaagtaaaatcacggttggcgctttagtcgctgtcgggatggcaattatcgaacctgccttaatgatggttgctggattaaacgtcgatcatccagcacaattcttcctaatggcaattaccttctcacttgcttcgatgtcgatcattatgttcttatcaatgacatttgataatcctggtcgtttcttagcaatggtcctcttgatgcttcaattaggggggtcaggtggtacattcccaatggaaatcacgaaccacttctacaacgtcattcacccattcttaccaatgacgtattcaattctagggctcagagaagcaattacatctggtttaggtaccggtcaaattgttcaatcattctttgttctcttagccttcatcgtcgtagcactcttgctattatggttaggaatgaatcatttacaaaaaatcggcaacggtggtcgctcacaattagacgacaaccaaaaattacaagatgtcgaaaaataatcaatagaaaaagcctgtcagctaaatgctggcaggctttttttagtgcaattaagtattcttaacgtctaagaatgtataaccgcggcgatcataacggttgcgacttcttgagtattcaatcggttggccattatcgagataaacaacttgttcaacttctaagacgggatcagttggggcgcagtccagatattgctggtcatattcatcggccttgtcggcttgaatattgcgaaaggcacccgcgaatgtgaggtgtagggtctccttaaggtaggtatagattgactgtgcgagaacatcatcagttaatccgggaactagactcactggcatgtaggtatgttcgaggacgctattaacgccgtcgataatccgtagtcgaatgattttgtagacgggctgttgatcagcaagcattaagcgctctttaatctcaggcgttgggaaagtcacctcaaacgtgatgaccttacttgagagtgttttaccaatgtcggctaagtcgcgtgacatcccacggtattgatccgctggtgccgttgatttattccaaaaagagtggtctaacacctttgtaccagcgccgcgtcgtgatagaacgagtccttccatcgttaaaatcgtgattgcttttttgatcgtcattcgactggcatcgaattcttgaactaagtcggtttgattgggtaacaacgtattagcaggatagcgcccttgtttaatccgttgtcgaataatgttggcaatttcttcgtattttggcaaaaaaaataccccgctttctacttatagtttagtggaaacaacggggtaaaacaatctttagtttgccagaggatctttttggcgatctagcattttaatgaatgggaaccagatgagaccgactagcacaacgtcaatgagttgtaagatcccgccgagtactgagttggttgcgagcatcccactgaagaagattgggacggtccatgggactgaaaccccagttggcgcaggcaccaatccgattgccattacagtgtagttgagcgctgtgacaatcagtggtgcaatcagccatggaatgaaaattgtggcgtttaaaacgattgggaacccgaaaatgacaggttcgttaacgttgaagacagcgggtgccaaggccaaacgtccgacatcgcggtattgttttttcttcatgataaaggccatcagtaagacgacggctaatgtcatcccagaaccaccgagacctacggtgaaagtttccatgaatggtttcgtgacaatatgtggtaaagcatggccagctttgtaggcttccaagttttcgagcattaatgtgttccagatcggatccattacagagttgacgataatttgcccgtgaagaccgaagaaccagagcaattggacaaagaacaatgcgattagggttgcaggaagactgccacctaaaccaacgagtggtttttgaataatttcatagatcacgtcgtgcaagttaacatggaataaaccagtgactgccgcttgaatgactaagaaaatggttaaggttaaaatagctggaattaaagcggcgaatgatttcgcaactgcaggtgggacaccgtctggcatcttaatttgccagccttttttagtaatccggcaataaatttctgcagcgataaatgccgcaatcatcccaatgaacatccctttagcgccaagtcgatcgagacttaaaacaccgctaacgtcaacgcctttatcggtggtcatcatgaatggggtgaggattaggaaactggcgaatgaaacagcaccgccgaaaattccgtccacatcatatgaattagaaagataataaccaatcccgaatgtgacgaagaccgtcatgattgacattgtggcattttgtccattaccaaggagttccgttagggtcgctttggtggcatcgttgaaaaatggcaggttagtgataacgacaatgattgatccaaacatcgtcagtgggaatgaaagcataaatgcgtctcgtagaacagttaggtaacgattttggcctaacttatttgcgaaaggcatgattttcttgctaagcgtgtccataaaagtattcacgtagagcaccgtcctttacatgtgtttgcaatcgattacattctcaatatagcacgctctttttgaaaagtctagacatttaaataaaagagttggttttttaaaaagaagctgatatactgaggctattcaaacaagaaggagtgctagcgatgactttttatgactttccaaaggatttttggtggggttcagcagcaagtggtccccaaacagaaggccggattgacggtgatggtaagggcgataatatttgggattattggtatcaacaagcgccagaaaagttttttaaccaagtaggcccagcgcggacctctgatgtgtatcaacaattcaaaagtgatatccaattgatgaaacaaacagggcacaatagttttcggacatcgattcaatggagtcggttgtttccacaaggtacgggggagattaatcaacaagctgtcgatttttataatgcgtacatcgacgaattaatcgcaaacggcatcgaaccgtttatgaatttataccattttgatatgccgctagcactccagaaaaaaggtggttggctcaatcgtgagacggttgatgcttacgttcattatgctgaaacctgttttgaattatttggggatcgggtgaaggaatggttcacacacaatgaaccgattgtgccggttgaaggcggctatttatatcagttccattatccagctgaaattaatttagcgcatgcggtacaagttggttatcacgaaacattagcgagtgcgatggcgattcaaaaatatcacgcacgcaatcaaggggggcaaattggcattatccttaacttaaccccaagttatccccgggatgcgactaatccggcagatgtgaaagccgcacaaattgcagatgcttttttcaaccgttcattcttagatcctgccgtgaagggggaattccccgctgatttggtcgcgattttaaaaaatctagccatcttacctgactatcaaccagctgacttagcattgattaaggcgaacactgtggatttattggggattaattattatcaaccacggcgcgtgaaggccaaggaaaccccaatcgaccatacaaacggcccgatgccggatgattttttcgacaattacgatatgccgggtaagaaagtcaatccgtatcgcgggtgggaaatctacgaacgtgggatttacgatattttaaagaacgtccgcgaaaattacggcaacattgcttgcttcatttcggaaaacgggatgggcgttgaaggcgaagaacgttatcgcaatgccgatggccagattgatgatgactaccggattgaatttgtacaggatcatttgaagtatgtccatcaagccctccaagaagggagtagctgtctcggttatcatatgtggacgtgtatggataactggtcatggaccaacgcctataagaaccgctacggttttattgcggtggacttagaccatgattgccaacggacgattaaaaaatcaggtcattggttcaagcaagtcgctgatcaaaatgggtttgaagcctaatcgaattgaaaaggcacaatcgacgaaacaatcgttgattgtgcttttttgtctgttatattcgggtaaacttgataaccatcaagttcttaaaatcggctttcttctatactaaagacaatcgttaggaagaagggattttaaatgaaatttcaaagatggttacaatccgtgaagaatcagattgcgctgactgttggcggattgattgcagtggcctatggctggtattggcttggtggggcggtaattgtgatgcaagggctgttattggttgcgtcaatgatgggggttgcaccgattttgatgcaggcgtatcaagcgctaaaagtgaaagtcatcagcattgatttgctggtcacgattgcggtattgggagcgctaatcattggtgagttcaatgaatcggcgattgtcacgttcctctttttattcgggagctatcttgaacaacgaaccttgaaaaagacacgagaatcaattcgcgcattgtctgaaatggcgccacaaacggcacaagtgttagcggccgatggcactactacgacggtagatgttgatgatgtcgaaatcgatgatcaagtattggttaaagctggcgctcaggtgccggttgatgggcaagtcgtccaaggtagtgcctatgtcaatgaagctagcatcactggcgaagcacaactcgttaagaaaatagtgggtgatgctgtttattccggggcaattgtggataacgggacattgacggttaccgcaacgcaggttggggatgatacaacttttgcccaaattattgaattggttgaagaggcccaagatagtaagtcacccgcggaaaaattcattgatcgttttgcgacgtattacacaccggccgttttagtgttggcattagcgattggcttaatcacgcgcgactttaaactcgcgattacgattctggtgcttggttgtccaggtgcgctagtaattggtgcgccagtttcaatcgtggcggggattggcaatggcgcgaagcatggggttttgattaaaggcggcgaagtcgttaatgcgatggctggcattgatacgatggtctttgataaaactggaacattgactaaaggggacacggcagttgcacatgtgcaattttatacagcggcagaacaagcaacgttggcagtgactaccgcggttgaagcacagtcagatcatccactggcgactgcgattgtgcagtatgcacgggaacgaggggtgacagacttaccaactattgaacgaattgaaacgctcaaagggttgggggtacaagctgaagtcgctggtcaaacaattcggattgggcgggccaagatgatgactgaagtagggatccggttaaccggtgcgcagattgcggcgatcacggccagtcaaacagcagggcaatcaaccgtattagtcgcagttgaccaacaagttgttttattaattgggattgctgatactgttaaaccggaagccaaggcagcattaacgcgtttgaaaaaagcgggcgttaaacatttagtcatgttgacgggcgataatgaccagacggccgcagcaattgccaaagccgtcgggattactgaataccacgcgaatcttttgccggcagagaaggttgaattcattaagacctaccaagcaaacggtcaaaaagtggcttttatcggggatgggattaatgatagtccttcgcttgcactggctgacattggaattgcgatgggttctgggacagatgtcgcgattgaaacttcggatattgtgttaatgcaatcgacgttatccgaattagtgtatgccgattacctcacgaaggcgacggcacgtaatacagttcaaaatattgtgattgctgttggaacggtcggattgttattgcttggcctgatggttggctgggtacagatggctagtgggatgtttgttcatgagattagtattctggtcgtgatattcaatgcgatgcgcctgattcggtttaaagttcgctaaacttgatggcggtcaatttttaatcatgcagcgcgcgatatagtaacagtaatcaaacgaaaaggtggtcattgaaatggcaaaattggtgatgcaattagacgagctatcatgtccgtcatgtatgcaaaagattcaagcgggtgtcagtcaacaagatggggttgaatcagtgaaagttctctttaatgctagtaaagtgaaagcagaatacgatgaagccgtgacaaacccagatgaattaacacaagctgtaactgacttgggctacagcgttcaaagtatcaaagtgaaatagggggcaattaatatgttatctaatgaagaaatcgaaacacgttaccaagcagaagttaaacaagctgatgttgatcaccatacaccaaccgcgggtgccatgatcggccatgtgatggctaacttaacgattcaacggcgtaaactccgtcaaatgaagtggtacgctaaaggaatcaataaccaagcttttaaagcgcaattaaccacattgcttgcagaaaatgatatgctattagacaagacggccgaacggctactagacgaaggtgaagtgcttccgacgacgcaagctgagtataccgagtatgggatgctgacagaagagccgcggattaagtactgggagatgccagcgatgattgcggaaatggttgcggactataatactgctaatctatttgtttcccgtgcgattaaacttgcggaaaaagaagaacgatttgcttcagcggcggatatggtttctttaatgggctacaaccaacaccaaatccgtgaattgcaaagccaactaggaaaagcagcgcgcgaaggattagatgaagaagacgacgattaagatagagggaagtgggctaggtgactgacgaacaacatatttgtgctgagatagtaccgatttttaatcatttagaccgtgatagtttggtcaagatttcggcagttacccatcatgaacgcgttaaaaaagggacgttggtgatgagcccgatggatcagaagcggttagtgatcttagctaaggggagcattaaggtctatcagctctctacagcaggcaaagagcaactgctacgcatgatggaacccggtgattttgaaggagaaaagttactttttaaaacggaagatgagccgttgtacggtgaggtcttgcaagatagtacaatctgtacgttaccgcggagtgcttttcaacagttactgttagcctatcccgaaattagtttaaagttactagaagcaactactgataagatgacgcgtttggaaaaacaggcgaacttaatcaatatcgagtcagttgaatccagaatcgtgacttatctacttgatttagctaaagcgagcggagaaactgaagtgatgattccgatgaagttaaaagaactggcaacatatattggaacaacgcctgaaaccttatcgcgtaagttaaaacagttagaaagtcatgcgctaattgaacgaaacggtcgaaagattgcgatattagactatgaaaacctagaagacttctattaggacgtgaagattctgcgaattttgcaggatctttttgtttacctataccaatttggataaaattggaacaaatagcagtttaaaagtattatgagggataatcaatagcgcagattagggatgagaatccgggtgatatgaattattttttcgatatttatacaggaattcaatttttttgaatttttttcaaattagtgattgacgttgtcccactaggatggtaagatattctatgtcgtcgagagatgagcatgtagcaaaacgttgaatgaatattacttaaaaaaagttgttgacattcgggtttatacatgataagatagattgtgttgcttatgagttttaacttaataagtgattaactaatatctgatgtagacctttgaaaactgaacaaagtttcgacaaaccaaatgtgtagggtcgcccttcggggcacaaaacatatttgcaaagtcaatttcgctagcaaataaattaagtaacaaaacaagagctacaaacttttaatcgagagtttgatcctggctcaggacgaacgctggcggcgtgcctaatacatgcaagtcgaacgcactctcgttagattgaagaagcttgcttctgattgataacatttgagtgagtggcggacgggtgagtaacacgtgggtaacctgccctaaagtgggggataacatttggaaacagatgctaataccgcataaaacctagcaccgcatggtgcaaggttgaaagatggtttcggctatcactttaggatggacccgcggtgcattagttagttggtgaggtaaaggctcaccaagaccgtgatgcatagccgacctgagagggtaatcggccacactgggactgagacacggcccagactcctacgggaggcagcagtagggaatcttccacaatggacgaaagtctgatggagcaacgccgcgtgagtgaagaaggttttcggatcgtaaaactctgttgttggagaagaacgtatttgatagtaactgatcaggtagtgacggtatccaaccagaaagccacggctaactacgtgccagcagccgcggtaatacgtaggtggcaagcgttgtccggatttattgggcgtaaagcgagcgcaggcggtttcttaagtctgatgtgaaagccttcggctcaaccgaagaagtgcatcggaaactgggaaacttgagtgcagaagaggacagtggaactccatgtgtagcggtgaaatgcgtagatatatggaagaacaccagtggcgaaggcggctgtctggtctgtaactgacgctgaggctcgaaagcatgggtagcaaacaggattagataccctggtagtccatgccgtaaacgatgagtgctaggtgttggagggtttccgcccttcagtgccgcagctaacgcattaagcactccgcctggggagtacgaccgcaaggttgaaactcaaaggaattgacgggggcccgcacaagcggtggagcatgtggtttaattcgaagcaacgcgaagaaccttaccaggtcttgacatcctttgaccactctagagatagagctttcccttcggggacaaagtgacaggtggtgcatggttgtcgtcagctcgtgtcgtgagatgttgggttaagtcccgcaacgagcgcaacccttattactagttgccagcatttagttgggcactctagtgagactgccggtgacaaaccggaggaaggtggggacgacgtcaaatcatcatgccccttatgacctgggctacacacgtgctacaatggatggtacaacgagtcgcgagaccgcgaggtttagctaatctcttaaaaccattctcagttcggattgtaggctgcaactcgcctacatgaagccggaatcgctagtaatcgcggatcagcatgccgcggtgaatacgttcccgggccttgtacacaccgcccgtcacaccatgagagtttgtaacacccaaagccggtgaggtaaccttcgggagccagccgtctaaggtgggacagatgattagggtgaagtcgtaacaaggtagccgtaggagaacctgcggctggatcacctcctttctaaggaataatacggaaaaccttgtacatttgcgaagtcgaaactttgtttagttttgagaggtctactctcattgaattaggacgttttttgggcctatagctcagctggttagagcgcacgcctgataagcgtgaggtcgatggttcgagtccatttaggcccattgtactaagaattaaatagtaccaacacgggggattagctcagctgggagagcgcctgctttgcacgcaggaggtcatcggttcgatcccgttatcctccattgatgacaatagtcatcgaaactttgttctttgaaaactggataataagtaatatattagttttaaaagccgagaaaacattgcgttttaaagagttttttaatagaaatatgaattagttcatatcgctaaactcaaataataaccctttaccgtaggtaaagttaggttaagttataaagggcgcacggtggatgccttggcactaggagccgatgaaggacggtactaacaccgatatgcttcggggagctgtaagtaagctttgatccggagatttccgaatgggggaacccaatacctttagtcgggtattatcattaagtgaatacatagcttaatgaaggtagacgcggggaactgaaacatctaagtacctgcaggaagagaaagaaaaatcgattccctaagtagcggcgagcgaacggggaagagcccaaaccaagaagcttgcttcttggggttgtaggacagaacattggagttaccaagttaagttgtaatcgaatcagctgggaagctgagtcaaagagtgtgataaccacgtagattaaacaacttaacctccgttctggatcctgagtacggcggaacacgtgaaattccgtcggaatccgggaggaccatctcccaaggctaaatactccctagtgaccgatagtgaaccagtaccgtgagggaaaggtgaaaagcaccccggaaggggagtgaaatagatcctgaaaccgtgtgcctacaattagtcaaagctcgttaatgagtgatggcgtgccttttgtagaatgaaccggcgagttacgtttatatgcgaggttaaagtgaaaagctggagccgtagcgaaagcgagtctgaaatgggcgagtgagtatatagatgtagacccgaaaccaagtgacctacccatgtccaggttgaaggtgtggtaaaacacactggaggaccgaacccacgtcagttgaaaatggcggggatgaggtgtgggtagcggtgaaattccaatcgaacttggagatagctggttctctccgaaatagctttagggctagcctcggaatattggatcatggaggtagagcactgtttggactaggggcccgtcatgggttactgaattcagataaactccgaataccattgatttagttccgggagtcagactgcgagtgataagatccgtagtcgaaagggaaacagcccagatcaccagttaaggtcccaaaatttatgttaagtggaaaaggatgtggcggtgcacagacaactaggatgttggctcagaagcagccaccatttaaagagtgcgtaatagctcactagtcgagtgccgctgcgccgaaaatgtaccggggctaaacataataccgaaactgtgggtggacacgtaagtgtccgcggtaggagagcgttctaagggcgatgaagctagatcgtaaggactagtggagcgcttagaagtgagaatgccggcatgagtagcgaaagatcagtgagaatctgatccaccgtatgactaaggtttcctggggaaggctcgtcctcccagggttagtcgggacctaaggcgaggccgaaaggcgtagtcgatggccaacaggttgagattcctgtactagtttattttgtttgaacgatggagggacgcaggaagctaaggaatgcacacgactggaaatgtgtgtctaagcaacaagtcttgagttgagtgaaatgcttgattctttaaggacaagttgtgatggggagcgaaattaagtagcgaagttcctgatgttacactgccaagaaaagcttctagtgagaaataaactacccgtaccgtaaaccgacacaggtggtcgaggagaatatcctaaggtgagcgagtgaactctcgttaaggaactcggcaaaatgaccccgtaacttcgggagaaggggtgctgaccgtcaggtcagccgcagtgaataggcccaaacaactgtttatcaaaaacacaggtctctgcaaaatcgaaagatgacgtataggggctgacgcctgcccggtgctggaaggttaagaggatgagttagcgtaagcgaagcccagaattgaagccccagtaaacggcggccgtaactataacggtcctaaggtagcgaaattccttgtcgggtaagttccgacccgcacgaaaggcgtaatgatttgggcactgtctcaacgagagactcggtgaaattataatacccgtgaagatgcgggttacccgcgacaggacggaaagaccccatggagctttactgtagcttgatattgagtgtttgtacagtttgtacaggataggtaggagccgtagaaatcggaacgctagtttcgatggaggcgttggtgggatactaccctaactgtatgaccactctaacccgcgccatttagcgtggcgggagacagtgtcaggtgggcagtttgactggggcggtcgcctcctaaagtgtaacggaggcgctcaaaggttctctcagaatggttggaaatcattcgtagagtgtaaaggtataagagagcttgactgtgagattgacaaatcgagcagggacgaaagtcggacttagtgatccggtggttccgtatggaagggccatcgctcaacggataaaagctaccctggggataacaggcttatctcccccaagagtccacatcgacggggaggtttggcacctcgatgtcggctcatcgcatcctggggctgtagtcggtcccaagggttgggctgttcgcccattaaagcggtacgcgagctgggttcagaacgtcgtgagacagttcggtccctatccgtcgcgggcgcaggaaatttgagaggagctgtccttagtacgagaggaccgggatggacatacctctggtgtaccagttgtgccgccaggcgcatcgctgggtagctatgtatggacgggataaacgctgaaagcatctaagtgtgaagcccccctcgagatgagatttcccattcctttatggaagtaagacccctgaaagatgatcaggtagataggctaggagtggaagtacagcgatgtatggagcggactagtactaatcggtcgaggacttaaccaaaggtgcaatgttaggcttttgaaatgaaatattacttattatgcagttttgagagaacgaagttcttctcagtgcgcaagcacaaaatagtgtggtggcgatagcaagaaggatacacctgttcccatgtcgaacacagaagttaagcttcttagcgccgatagtagttggtgggaaactacctgcgaggataggacgttgccgcgctttttattgatggaggtttagctcagttgggagagcgtctgccttacaagcagagggtcacaggttcgagccctgtaacctccattgagtcgttagctcagttggtagagcatctgacttttaatcagagggtcgacagttcgagcctgtcacgactcatcggccaagttacacgccaaaatgcgggtgtggcggaattggcagacgcgctagatttaggttctagtgtctatatagacgtgggggttcaagtcccttcacccgcattcaattgaatattcaatgaaagttatcttattatgccgacttagctcagttggtagagcatctgatttgtaatcagagggtcgggcgttcgaatcgtctagtcggcattaagatgcggaagtagttcagtggtagaacatcaccttgccatggtgggggtcgcgggttcgaatcccgtcttccgctttcattatgattaagccggggtggcggaactggcagacgcacgggacttaaaatcccgcggtaggtgactaccgtaccggttcgattccggtcctcggcatcataatgaaaaatgcacccatagcgcaactggatagagtgtctgactacgaatcagaaggttgtaggttcgactcctactgggtgcatataacgggaaatagctcagcttggtagagcacctggtttgggaccagggggtcgcaggttcgaatcctgttttcccgactggatacaaaaatattaataaaaaatgcggaagtagttcagtggtagaacatcaccttgccatggtgggggtcgcgggttcgaatcccgtcttccgctttttttgtacccgtaataaaatagtttccgggaagtagctcagcttggtagagcactacgttcgggacgtaggggtcgcaagttcaaatcttgttttcccgactctcaaagacttgttgatgacaagtctttttgggtctttgtcaactggtgttggtggcgaaatattagaggtatttgtcgaaaggcagatgcctcttttcttatcccaaaattaattggattcgggtaaagaaatgctgaacgttcttaaaaccataacaattacgtttaagtgtttttatttttcggtttaaaccttctataggcccgtttgagaaaggatattcgagagcgtttttaatataatggcgatttcgctttagtgttcggatcgtcacatctagggggctgttagatggtgtatatgtatctagcaggtgttctattgcttgaaagttcttagtttgaactgcgttcaaaatggtttggtaagcttgatagacacgcgaaaactcgggattatattgtaatcctagatcaacaatattttgttgtgtcgtgtattcatttaaaccgcgataatatttaatatgctgggcatctaaaagtgtttcactcttattaaatagtcgccaatgcgttttaagtgctttgtacgttcggttgtgatggtcctcggtttgtttaacggttaatacacgggcatcagttagtgttcgctgaattagttggataatatgaaatcgatcaatgataatttcagcatttggaaataattgatgtgcatacgttgcataatcggcgttcatatcgactgtgacggtttcaacttgttgtcgctcgtagagcgaatattgattaagaaagaactcaataattgttttcttctttcggtctggtaataagacgagctgcttatgtgtatctgcatcaatgccaataaaagcgtactcgtttttcttgatactaaattcatcaaaactgagattgtgtggcagtggcttgtgatgccagtgatagtggctatttttgtataaaatccgattaactgagctaggcgaagcaccaacgagtttcgcaatctctttgagtgttaaactatcttgggctaattggatgattcgctcaataatatcttgtgtgaaaatactattgaaatttaaaaacggactacgtgcaaaatggctagagtggcaatttttacagtagaaacgttgtttaaataaccgtaaccgataagggatcccattcagactattaatatcgtaggtaacttctttgaagccgttcttaatctgtgcacaaagcccacagtcaggacaacgtcctggtttatagcttaatttggctttgattattttggttctaatatttttgatgaatgtattataaacctcgtaaggtttaatattctcgtctgtaatatcaagtaaatttagtatataatcagtgttggacatcttaacgcctgctttcatttttggtttagtcacttaaaagcgtaacgcagaatatcgttgagatgttctatttttttgtcataaattaaaaaaaggtgtcagtagaatttcttctaccaacaccagaaagtttagacccgtctttttttgtgcgtccaattgattagctactaaaagtcagtaaactttcattttgtactgataatcgttataataatagtcaacgttagtcaaagttaaacttttaacactgaaaaacgcagaagactaaatgaaggggctgatatgtttgcaaagtcagaacatctcggatattattgaagcctatctaaaaaagatactggctgacaatgaacaaatcgaaattagacgctccgaaattgctaagctttttaattgtgtgccgtcccaaattaactatgtgattaatacgcggttcactgagcagcgcggttatgtcgtgaatagtaagcgtggcggcggtggttatattcggatcgtcaaggttcaatttctcgatgatcgggactttttagaagcgttaattgaaaatgttgatacgcagatttcccaggcggacaccttagccattatccagaaactatatgatgaacaaattctttcgcaaaaggaaggcaatttgatacttgcggcaacgagtccacagacattagcggttaataataaacaattagaagagcagcttcgagcgcagattctagttgcagtgttagaacgactacgatatgaaattaagtaaagagtgggggattatccatgaataatctatttacaccaagtgcaaaaaacgtcttaatgatggcacaagaacaagcaaagaaatttaatcaccatgcactaggaacggaacatctcctattagcaatcgtattagaaaatgagggaattgctgggactaccttacgcgaattaggtgtcaattcgaccgatgtccttgaagaaattgaacgcttaaccggatatggcgatgctgtaatcgcttctggcattggcggttatttaccatattcgcccaaagccaaacaagtactcgatattgctcgggttgaagcgcaacaagctaattcggttaaaattggcacagcacacctattattagcacttttacgtgatgatgatattatcgctgcgcggatcttattgaacttaggacttagtttagctaaaacacgccaactactacttcaaaagatgggtgtggatacggcaaccgctaaaaaacgggctaaagcagctaagaataatgccgatcaagctgggacgccaacgttgaaccaattagcgcgcgatttaacacaacttgctcgtgacaatcaaattgatccggtcgtgggtcgtgatgaagaagttcggcgacttgtgcagattttagcccggcgttcaaaaaataatcccgtcttagtcggtgaacccggtgtcggtaagacagcgattgctgaaggatttgcgcaacgtattgtcaatggcgatgtgccaagtgacatgcagcaaaagcggctcatgatgctcgacatggggtcattggttgctgggacaaagtatcgtggtgaattcgaagatcgtttgaagaagattatcgatgaaatctatgcagatgggcaagtgattctctttattgatgaattacacaccctcattggtgcaggtggcgctgaaggggcaattgatgcttctaatctcttgaaaccagcattagcgcgtggtgaattacaattaattggtgcgacgactttagatgaatatcaaaagtacattgaaaaagatgcagctttagagcggcgattcgcgaccgtcacggtcaatgaaccaacgccagaagatgcggaacaaatcttaaagggattacgtcgacgttatgaagctcatcatgggattgcaatttcagatgaagctttacatgaagcggttgtcttatcaaatcgctacatcacgaaccgattcttaccggataaggcaatcgatttaatggatgaagcgacggctaaggtgcgcttggatgctgttaaccagaagacaccgtcggataaattagaacaaaaactacaaactttaaatgacgataaagaagccgctgttcgcgcgcaagattttgaaaaagcggcgacgattcatgagcaagaagtaaccactaaggccaagattgccaagttacaagctgccgaacaagaaaacggtgttcgcagtgacattcaagtgactgctgaagacatcgctcaagtggttgcgcaatggaccggtgtgcctgttactcagttgcaacgcaaagaaagcgaacgtctcatgcaacttgaaaaagtcttgcataaacgggttgttggccaagaagaagccatttctgccgtttcacgtgcgattcgtcgtgcgcgcagtggtttgaaagatccaaaacgaccaattggttcatttatgttcttaggcccaaccggggttgggaaaacagagttagccaaagcattggcggaagccatgtttggttctgaagacaacttgattcgggttgatatgtctgaatatatggaacgttacagcacgagccgtttagttggggcggcccctggctatgtcggctacgaagaaggcggccaattaacagaaaaggtccgcaataaaccatattccgtcattttatttgatgaagttgaaaaggcccaccctgatatcttcaatatcttgttgcaagtcttggatgacggctatttaaccgattcaaaaggacgtaaggttgatttccgtaatacgatcatgattatgacatcaaacttaggtgcgacagccttacgtgatgataaatccgttgggttcggggttaaagatgtaactgctgattataaagcaatgcaagggcgcattatggaagaattgaagaaagctttccgtccagaattcttaaaccgaattgacgaaacggttgtcttccattccttaacacaacctgaattgcgcgaaatcgtgaagattatggcgaagaatgtcttgggccgtttagcggaacaagggattcaaatcaagatgacagctgcagcgatggatgttgttgccaaagctgggttcgatcctgaatatggggcacgaccaattcgacgggcgctacaaacccaagtagaagatcagttgagtgaagcgttgcttgctggcgagattacgatgggtgtaccggtgacaattggcgcaactaaaggtaaaattaccattaccagtaagactgataaagtaactgtttaaacgtaaataaggtgtcagaccaattggtctgacaccttatttttttgccctaaaagggtcgtgagctgttcaatttcagttttaatcgcagcgccgatattcgtttgactgacacgttgacgttgactaacttgatcaatcactcgacgcgtggaaataatgtcttgcatcttggcaattgcattggctcgtgtggtgaacggctgatgggtgactaactgcattccatacgaattgtacaggagcgtaaagccaccaatgccagttgtgtggtgataagcttttgaaaagccgccatcaatcacgatcattttgcgattagccatgattggattgtggccttttttgacaggtgtgtgaccattgagaatgtgccccgtttctggcgttaagccaaactccaacaagagtttctcaatgaagtcttcctgatggcggagttggtaatatgcgttcttcttttcttcgtgtaaaacggggtcggcgctgaagtagcgttcgaaggtcgtcatcgcgttcttgccaaatagtggggagagcggtcctgtccacaggtaccagagtaaatcggtggataaattatcttgattgagcgggtggtcgaagctcattcgaatttggtgatcgaagaagtcgagtaatgatttaccagcgtattgtcggttagcgagggttaacgtgaggaagttgccggcttcatcaactggaatacagccgtgaaaaaggagattctggttgtagagttggtacatgctaccgctgtcgattaaaaaacgcagatgcttgcgtagtttttggcagtgggtaaacgcgtttagcaatgatgtaacaatggctgcttcatcggaagttaatatttcggggtgggtggggtcgactgtttgaaagcaggtgctatcaagtgggtagtcatgaccatttagatgaattgtctgctgttcaaagtcaacatggctgagggttaagcggtggtccattttgaaatcaggattgcgtttaatcacggtttgttccaacttaaactgcatgatggcgatggcttggtgcacttggttgatgcttttcttttcagctgttgagattgcgggttgattggcagcaacctttggttcgaaggcgggattgggctgataagttcgttgggcaaactgaaccagttcgctaaggtcaattccgtaagctttctcgatgatggctaaattgttgtagcgtgcgcaaatgcgtaaaaggttgagcatacatagttgagaaccgctagcggcgccgaaccagagaatatcatgattgccccactgaatatcaaccgcggggagcttggtgagttgttcgacaatcagatcgggacgcggcccacgatcgtaaatgtcaccgatgatatgccaatgatcaaccactagtcgttgaatcgtatgactggtggcgataattaaggcatcggcttggcccatcgaaatgatggacgtcgtgatttcttggaagtagcgtttcttatcgctgttagctacatcgccgtacattaattcttcggtaatgtagacgaaatcgggtgccattgctttacggacttttgagcgtgtgtattttgtggagacaaattttaagaggtcgattaaccgtttaaaagtggtgaggtaccactgatcgagttcgctagcagatagttgtgcgtgtttgagtgcaagccgctcggttgggtagtaaactaaaaaagcgaacgcctgcattgtgtcttcagtcatttcaccggaaaagacctctgcaattttttgccggagattccctgcgccagtgcgaatgagatgctggaaggcatcatattcgccatgtaaatcactcatgaaggcttcagtgggtttggggaggttcaagatggcctttaagttgatgatttcggaagtaattgccattttagtggggtatttttcggataacgttttcattttattgttaatcattcgccaaactcctttgataaactaatagttcgattataccaatcataaatataaatgcaaattactttgtttaaaagctttttattagtatataccaattaaaaagtcgcgcagtttagcgcgacttctggaaactattgatcttggatggtgccatcaacgtggcgctcaactttcatttgcgtcattgggatgtagcccagtttagggacgattgtcttttgaatgtcttttgattggatgaagtggatgaaacgggctgtttgatagttaggtgcgcccttagtatacatatgttcgtaagaccagattggccatgcattggttgaaacgttcttttcggtaggctcaacgtcgtttaacttaacggcttgcaagttacctttgatgtatgggaaggcgaggtaactgatagcgcctggcgtttgttcgacgattttttgaacagtcccagaggaatcttgttcttggctggtaacaactttgtcggttttaagacctaatttttcaaacgtttgacgtgtcccacttccttgggcccggttgataacggtgattttttcgttaggaccactaacggattgccagtttgtgattgcgcctttaaagatgcctagcaattgtgcactggttaaatttttgatgcctaactttttattaacaacgggtgcgattgcaaccacagcaactttgtgatcaaccagtttcttagcatcgataccatctttttcttcagcgaagatgtccgagttaccgattgtgacgttgccaccactaatttgggttaaaccagttcctgaaccgccaccttgaacggtgacgttgactttagggttatccttttgatattgatcgccagcttgctcaacaaggggttgaagggctgtcgaaccaactgcagtaattttagcgccttgatcctggctttgacttgcactttttgattggccttgacaaccagctaataaaagagcggccgcgcaaactgtgagtaatgccatactaatgcgtttcataatgattcctcctgaggactgatttaagggtacaagttcagtatagagacgtcatgtaaagattgaccgctaattcgtgtaaaaaacgtaaatgataagtcgcgagtttgtaaatgattccgtgaggggcttgaagattgtcattagagacttttgttaaaagggtgggtaggcgatacagccataaaatgctatgattaaatgagatagttagaaatggagcaaatacataatgttatttattgcgatgatctacttgtttgtctgtttaccttttttatgtgctattgtccaacgcaatgatcgccaatttattcaattagttggtatgttgatcaatttggtgcttgtattaggattaacgattttagtgacttttgggttgactggtcatgttattcattttagtgatggtttgttccaaaagttatttttactcaagtttattatgttgattaccattattcaaggcgtcgtgttggtgacaagaaggtggcgccaaaaatggttaacatttgaactggtaccagtcacacgcacaagacattggtttagctggtggatttttagtggtgccttattaatatcagttgggtatttcttgttgtcagctagtttttggacaaaggcaaattttggcttgttaacgcccgagcagatagtttataacttacgccaaccgatgacaggtgttgacgatggttttattaattcatttatcggcggtccggtgctaggtgccattacttgtttaatcagcgtttttttgttctgcaactatatcagacacttgcaactgttggtcactcataaaataacacaccacttagaactcaaggcaaaacgatttgtattggtcagtgcgttattgttttgtggtttgacgacggttgctgcgattaaaattgatgctgttggtttttacgaatatctaacggcgaattcaccatttattgaagaaaattatgtagcaccgaataaaaccaaattaacgttcccaaaacaaaaacgaaatctaatttatatttatgctgagtcactcgaatctacagcaacatcaagagaaatgggtgggcagatgaaaaccaatttactaccagaattgacggcgttagctgagcaagagggtgttcacttctcaaattctaaccgatcatttggtggtgcccaacaattaccaggaacaggctggacagttgcgggaatggtcgcccaaacatcaggattaccgttgaaagtgccggtggatgggaattcctatgcgacagataaaaagaatcatttcctaccaggcgtcacgtcattaaataatattttggacaagcacggctatcagcaaaaaatcttgcttggatcggatgcgacttttggtggtcgacgatcatattttacgcagcacggtaatgttcaaattgatgatttgttaactgcgcgtaaagatggtcggttacctgaagactattatgtttggtggggctatgaagattcaaagttattcgaatacgctaaggaaagtgcgttggagcttagcaaatcagatcaaccatttaacttaacgatgctaacggagaatacgcaccacattggtgggtatccagaaccgaatatgccagaaaagtatggtgaccagtattcaaacgttatcgccttttctgatcatcaaattgttgaatttattaagtgggcacaaacgcagtcgttttatcagaatacgaccatcattgtcaacggagaccatttaggcatggatgtggagtattataagaagattccggccaataaacggcatgcatttaatttgattttaaatgcaccaaaagcaagtcaggttcaaaccaagaatcgccagtttagcacaatggacatgttcccaacgacgctcgccgcaatgggggttgatattaaaggagaacgtttaggcttaggaactaatctattttcaacgaaaaagacattaatagaagaaaagggattgaaaaaggttgataaggccttgagcgccaaatctaaattttataataatcaatttatctatgataagtagcaccgaggcagattattgacttttagtagtaaaagaagtatattatacagtaactgcgaaaatccgtagaaaaatttattgtgctgatctattgtccagcacggtattcatgaaaaacaaaaatagttagtctgatttattcagcttaaaataactgtttttgttttttttctgctcaaaattacctaaaaatggcgatgtaatattttcttaatatttgtcatatttttgtaacaatgaggctgcggaaaacttatagaggggtgaacaatttggcaggacacttagtgaattacggtaaacatcgtactcgtagaagctacgcacggattaaagaagtgctagaactaccaaacttgatcgagatccaatctaattcctatcaatggtttttagacgaagggcttcgtgaaatgtttgatgacattatgccaattgacgattttgctggtaacttatcattagaattcgttgattaccaacttcttgaacctaaatacacggttgaagaagctagacaacatgatgccaactactcagcaccattacacgttactttgaaattaacaaaccatgaaactggtgaaattaaatctcaagacgttttctttggggacttcccattgatgactgaccaagggactttcatcatcaacggtgctgaacgggtaattgtttctcaattagttcgttcaccaggcgtttatttcaacagcgctgttgataaaaacagccgcacaacttatggtacaactgtcattccgaaccggggtgcatggttagaatttgaaacagatgctaaggatattgcatacgttcggatcgatcggacacgtaagattccgatgtctgttttagttcgtgctttaggttacggttctgatcaagaaattatcgatatcttaggcgacaacgattcattaatgttgacgttagaaaaagatattcataagaatactgacgactcaagaacagaagaagctttgaaggatgtctacgaaagacttcgcccaggcgaaccgaagacagctgatagctcacgttcattactttatgcacgtttcttcgatgctaaacgttatgatttagctgctgttggtcgttacaagatcaacaagaaattaagcttaaagacgcgtttattgggtcaaacattagctgaaacacttgctgatcccgatactggtgaagtgattgctgctaaagatacagttgttgatcgtcaagtgatggatgctttggcaccatacttagacaaagaagacttcaagacggttacttaccaaccatctgatgaaggtgtcttaccagaaccaatgacactccaagtgatcaaagtgtactcacaaaaaacacctgataaagaaattaacttaatcggtaacggtcatatcgatgccaagattaagcatgtcattcctgctgatatcatcgcttcaatgaactacttctttaacttacaagaaggtctcggttcaacggatgatattgatcatttagggaatcgtcggattcgttcagttggtgaattgttacaaaaccaattccgaattggtttatcacggatggaacgtgtggttcgtgaacggatgtcaatccaagacacaagcaccgtgacaccacaacaattgatcaatattcgcccagttgttgcctcaattaaggaattcttcggttcatcacaattgtcacaattcatggatcaaaccaatccccttggcgaattgacgcataaacgtcgtctatctgccttaggacctggtggtttgactcgtgaccgtgccggttatgaagttcgagatgttcactatacccattatggtcgtatgtgcccaatcgaaacccctgaaggccctaatatcggtttgattaacagtttggctagttacgctgttgttaaccgttacggcttcatcgaaacaccatatcgccgtgttagttgggatacgcatgatgttactgataagatcgactatttaacagccgacgaagaagataactatgtcattgcgcaagccaactcaccattaaacgatgatggttcattcgttgatgatactgttttagcacgttacaaagatgacaatattgaaacttcaatcgacaagttagattacatggacgtttcgcctaagcaagtagttgctgtcgctacggcctgcattcctttcttggaaaatgatgattcaaaccgtgccttgatgggtgctaacatgcaacgtcaagctgtgccattgcttgacccacatgcaccacttgttgggacagggatggaatataaagcagcccacgattcagggattgctttattagcacaacatcccggaactgttgaatacgttgatgcgaaagtcattcgcgttcgtcgtgaagacagctcattagatacgtacgaattaatgaaattccgtcgttcaaatgctggtaagaactacaaccaacgtccaatcgttgcaaaaggcgatcacgttgatgttgatgaaattatcgctgatggaccagctatggaaaaaggtgaattagccttaggtcaaaacccattgattgctttcatgacttggaatatgtataactacgaagatgcgatcgttctttcagaacgtttagtgaaagaagatttatatacttcaatccatattgaagaatacgaatcagaagctcgtgatacaaaacttggacctgaagaaatcacacgcgaaattcctaacgttggtgaagattcattgaaggatcttgacgaattcgggattgtccgtgttggtgctgaagtcaaagatggcgacattttagttggtaaggtaacgcctaagggtgtgacagaattatcagccgaagaacgcttattgcacgctattttcggtgaaaaggctcgcgaagttcgcgatacatcattgaaagtacctcatggtggcggcgggattatccaggacgttaagatctttacgcgtgaagctggcgatgaattgtcaccaggtgttaacatgatggttcgtgtttatattacacaaaaacgtaagatccaagtcggcgataagatggctggtcgtcatggtaacaaagggactgtttcaatcgttgttcctgaagaagatatgccatacatgccagatgggaccccagttgatatcttattgagtcccatgggtgtgccttctcgtatgaatatcggacaagttcttgaattacatcttgggatggctgctagaaacttaggcatccatgttgcaacaccagtctttgatggtgcgcaagataaagatttatgggacgctgttcgtgaagcaaacatgccttctgatggtaagagcattctttatgatggtcggaccggtgaaccattcgatacacgtgtgtcagttggtgtcatgtactacatgaaactagcccacatggttgacgataaactccatgcacgttcaatcggaccttactcacttgttacgcaacaaccattgggtggtaaagctcaatttggtggccaacgtttcggtgaaatggaagtttgggctcttgaagcttacggtgccgcttataccttacaagaaatcttaacttacaagtctgatgacgttgttggtcgtgtgaagacatacgaagcaatcgttaagggtgaaccaattccaaaaccaggtgttccggaatcattccgagtattggttaaagaattacaatcacttggcttggatatgaaggtcttggatatcgataatcaagaaattgaattacgcgatatggacgacgatgatgatgatatcgaaaacatcgatgcattatctaaatacgctaaagaacaagaagccaaaaaggcacaagaagaagctgaaaaagcacaagcagcaaatgctgatgcagtagatccatctgctgaataaagcgtgctataaattatgaggaggtcggccctttgatagatgtcaataagtttgaaagtatgcaaattggtttagcatcttcagataaaatccgtagttggtcgtatggtgaagttaaaaagccagaaacaatcaactaccgtactttaaaacctgaacgtgatggcctttttgatgaacgaatcttcggacctacgaaagattgggaatgtgcttgtggtaagtacaaacgaattcgttataaaggaattgtctgtgatcgttgtggcgttgaagttacacgttcaaaagtgcgtcgcgaacgcatgggacatatcgaacttgcagcaccagtaacacatatctggtactttaaagggattcctagccggatgggtcttgtcttagacatgagccctcgtgcattggaagaaattatttacttcgcatcatacgttgtgattgatccaggcgatacagccttagaaaagaaacaactgatgaccgaacgtgaatatcgtgaaaaattagatgaatacggtaatcgttttaacgctaagatgggtgctgaagccatcaaagaattgttacgtgacgttgatcttgaaggcgaagttgctgaattaaaggaagacttgaagtcagcacaaggtcaaaagagaacgcgtgctatccgtcgtttggacatcttagatgccttccgtaaatcagggaataaccctgaatggatggttatggatgctattccagttattccaccagatttacgtccgatggttcaattggaaggtggccgttttgccacatctgatttgaatgatttgtaccgtcgtgtgatcaaccgtaacaaccgtttgaaacgtttgttagacttgatggcaccaagcatcatcgttcaaaacgaaaaacggatgttacaagaagccgttgatgctttgattgataatggtcgtcgtggccgtccagttactggacctggtaaccgtccattgaagtctctttcacacatgttgaaagggaaacaaggtcgtttccgtcaaaacttacttggtaaacgtgtcgattattctggtcgttccgttatcgatgttggtcctacattgaagttctatcaatgtggattaccacgtgaaatggcacttgaattgttcaaaccattcgtcatgcacgaattagtgaaacgcgatatggcttcaaacattaaaaatgcaaaacgtaaaattgatcgtcaagatgacgatgtttgggatgttttagaagatgtcatcaaggaacgcccagttctattgaaccgagcacctacattgcatagacttggtatccaagcattcgaaccaatcctggttgatggtaagtcaatccgtcttcatccattagcttgtgaagcttacaatgccgatttcgatggggatcaaatggcgatccacgtacctttatctgatgaagcacaagcagaagcaagaatgttaatgcttgccgctcaccatattttggcaccaaaagatggtaaaccaatcgttacaccttctcaagacgttgttttagggaactactacttaacacttgaacaaaaaggtagtctcggcgaaggtatgatcttcaaagatacaaacgaagttttaatggcttatcaaacaggtcacgttcatttgcacagtcggattggtttgtcagttgttgatatggataatcgtccattccctgacgaacaacgccacaagattatggtaacaagtgttggtaaagtgatgttcaacgaaatcatgccaactggcttcccatatttgaacgaaccaacaacagataacttgatgaatggtgtgccagataaatacttcatcgataacggtgaagatattcatgactacctctcaagtgccccagtgatcttaccatttaagaaaggcttcttaagtgatatcatcgcgcaagtcttcaaggtatataaggttcaacggacatctgacttattggatgatatgaagaccttaggttatgttcaagcgacccatgctggtttaacagttggggttgccgatgttcctcaattacctgaaaaacaagaaattgttgatgaagcccataagaaagtcacaacggtttctaaacaattccgtcgtgggttgattacagatgaagaacgccatgcgcgcgttattgaaatctggaacgatgctaaagacgatatccaacaacgactcacagattcgtttgatccaacaaacccaatctcaatgatgtctgattctggtgctcgtggtaacatctctaactttacgcaacttgctggtatgcgtgggttgatggctgctcctaatggtgggatgatggaagttcctgttacatcaaacttccgtgaaggcctctctgtcatggaaatgtttatgtctacccatggtgcccgtaaagggatgactgatacggcgcttaagactgccgattctggttacttaacacgtcgtttagttgatgttgctcaagacgttatcattcgtgaagaagattgtgggactgatcgtggtcttctcattcactcaattcgcgaaggtaatgaattaatcgaaccattgtatgaccgtcttgttggtcgttgcgcaatgaagaccattgttaacccaacaacgggtgaagtgatggttcaacgtaaccaattaatggatgaacaacttgctcaagctgttgttgatgccggtgttgaagaagtcacaattcgttctgtcttcacatgtaacacaaaacacggtgtctgcaaaaaatgttacggtcgtaacatggccaacggcgaagaagttgaagttggtgaagcagtcggaacagtcgcagctcaatcaatcggtgaacctggtacgcaattaaccatgcgtaacttccataccggtggggttgccggcggtgaagatatcactcaaggtttgcctcgtatccaagaaattttcgaagcgcgtaatcctaaggggcttgcaacaatcactgaagtaactggtgaagttgttgcggtggaagaaaaccctgcagaacatacacgtgaaatcactgttcaaggtgaaacagatacacgttcatatagtgtgccttacacagccaacgtcatcgttaacgaaggcgacatggttcgtcgtggttctaagttaacgggtggttctgttgatcctaaacaattaattaaagtccgtgacgtcttatcaactgaaaactacctcttgcatgaagttcaaaaagtttaccgtatgcaaggtgttgaaatcggcgataaacacgttgaagttatggtccgtcaaatgctacgtaaagtccgtgtcatggatccgggtgatacagaaatcttacctggtacattaatggatattagtgaatttacagaccgtaaccacgaaaccttaattagcggtggcgtacctgctacttgtcgtcctgtcttgcttggtattacgaaagcatcattggaaacaaatagtttcttatcagccgcatcattccaagagacaacacgtgtcttaacggatgcttctatccgcggtaagagcgatccattacttggtttgaaagaaaatgttatcatcggtaagattgtcccagctggtactggtatggcgaagtatcgtcatatggaacctaagacagtcggcgctgtatcagaaaatgtctactcaatcagtgacatcgaagcacagatgaaagaagaaacaaaagaataactgagtgccaatttagaacagttgctctaaattgcacgttaaagggcctcaccgacatggtgaggcccttttttatgtgtttgcaataaacaaaacgattaagacaccgtagctgatatacgggacaaatggaattgggcggcgtccgactaaggcgaggacaactggatggtggagactatcaatgagatatttgattaaacagaggagacaggcaattaataacatggatagggtgacctccaatccaaaccacaacccaagaattgccaataattcaatgtcaccagtaccgatgccatctgaaaagtagttgatgacagataaggtgctgccaatcaatagggcactgagccaatggtttgtcggccagtagtcaataaacaaaggcataaaagccagtaccattggaactgggtatagagctgtatggaaaatatcgactaggctcaacaaataaaggataagcaataaatagccaatctgtggtgtgaaatattgactggctaaacaacacgctaacaagccgccaataacctcactagtaaaaaaatggtgctggattcgagtatcacaatagcggcagtgccctctgagaatgaggtaactgataattggacataagtcgtaccaagcgagggcgtgatggcagaagtcacaccgtgaaccaggccatgtgatggataaaccgagtggccaacgccaagcacaaacagttaaaaaagaggcgcaacacgcgccaataacaaaggttaaaaaatatattaacaaacgtgtcatctcctttatgataactacaaaaaaagggcgcaactttttctgaaaaactggcttatagcacgttgactttcgtagttgtgcatgctattcttgtagatgtgctttttacggaagttttctgatattcagacatgctgactgacgtctaaaaatgcattacaatccacgcaatctaggttgccatttttttatcgcaaaaaaagaaccacctggatgtgtggacttaaaactcaaaaataactttcagatcaaggaaggaggaaccttcaaatgccaacaattaaccaattggtacgtaagggtcgtaaatcaagaacttcaaagtctgatgcacctgcattaaactttggctacaacagtatgaagaaaaaagctacagataatccagcaccacaaaaacgtggggttgctactcgtgtgggtactatgacacctaaaaagcctaactctgctttacgtaagtatgcgcgtgtgcgtttatctaacttaatcgaagttacagcttatattcctggtattggtcataacctacaagaacatagtgttgttcttatccgtgggggccgtgttaaggatttacctggggtacgttatcacgttatccgtggtgctttagatactgccggtgttgacggtcgtatgcaaagccgttctaagtatggtactaagagacctaaaaaataacacacaaaaaaatttgaaaaagtcgattgaagtttaaatgacactgtgtgttacttcaaggacttaaatatcttgaggaggttatcaggatgccaagaaaaggctatgttgcaaaacgtgacgttttacctgatccaatgtacaattctaaattggtttcacgcttaatcaaccgcttaatggttgatggtaaacgtggtactgcgtcaacaatcttatacgatgcatttgatattattaaagaagaaactggtaatgaaccattagaagtgttcgaagaagctatgaacaacatcatgccagtacttgaagttaaagctcgccgtatcggtggttctaactaccaagtaccaattgaagttcgtccagaacgtcgtacaactttaggtttacgctggttagtaagctatgctcgcctacgtggggaacataccatggatcaacgtcttgcacgtgaaatcatggatgctgccaataacactggtgctgcagttaagaaacgtgaagatacacataaaatggctgatgccaaccgcgcatttgcacattatcgctggtaagattaacaaggttggctgttatatgtattcaaatcatataatggcctcttgttgtatatagcttaatattcgagaggagtaatattcacttatggcaaacaaacgtgaatttccgttagacaaaacgcgtaatatcggtatcatggctcatattgatgctggtaagacaacaaccacagaacgtatcttgtactacactggtaaaatccataagatcggtgaaacccacgaaggggcttcacaaatggactggatggaacaagaacaagaacgtgggattacaattacatcagctgctacaacagctgaatggaaaggtaaccgagttaatatcattgatacaccaggacacgttgatttcacaatcgaagttgaacgttcattgcgtgttttagatggtgcaatcactgtcttagatgctcaatcaggtgttgaacctcaaactgaaaatgtttggcgtcaagcaactacttatggtgttccccggattgttttcgttaacaagatggacaaacttggtgctaacttcgattactcaatgacaacattggaagatcgtttacaagctaatgcacatgctgttcaaatgccaatcggcgctgaagatgaattccaaggcgttattgatttgatcgaaatgcaagctgacatctatgatgaagatgaattaggtgctaagtgggatacagttgatgtacctgctgactaccttgaagaagctacaaaacgtcgtgccgaattagttgaagctgttgctgatgttaatgacgacattatggacaaatatttagaaggcgaagaaatttctaaagatgaattgaaagctgctattcgtcaagcaactatcgatttgaaattcttcccagttttcgctggttcagctttcaaaaataaaggtgttcaaatgttaatggatggtgttgtagattacttaccatcaccattagacgtacgtccttataacgctaaaaacccagaagatgattcagaagttgaattgatggctggcgatgacaaaccatttgctggtttagcatttaagattgctactgacccattcgttggtcgtttaacattcttccgtgtttatactggtacattacaatctggttcatacattttgaatgcaactaaagacaaacgtgaacgtgttggtcgtttattacaaatgcattcaaatcaccgtaacgaaattcctgaagtattctctggggatatcgctgctgcaatcggtttgaagaatacaacaactggtgattcattgactgacgttgatcatccattaatcttggaatcaatggaattccctgacccagttatccaagtttctgttgaacctgaatcaaaagaagatcgtgataagttagatcttgctttacaaaaacttgctgaagaagatcctacattcaaggctgaaaccaacaatgaaacaggcgaaacgcttatttctgggatgggtgaattgcatttggatatcatggttgatcgtatgagacgtgaatttaaagtggttgccaaaattggtgaacctcaagttgcttaccgtgaaacattcacaaaacaagcatctgcacaaggtaaattcgttcgtcaatccggtggtaaaggtcaatatggtgatgtttgggttgaatttacacctaacgaagaaggtaaaggcttcgaattcgaagacgctatcgtcggtggtgtggttcctcgtgaatacatcccatcagttgaacaaggcttgaaagaatcaatggcaaacggtgtcttagctggttacccattgattgacgttaaagctaagttatatgatggtagttatcatgatgtcgattctaatgaatcagcatttaagattgctgcatcaatggcattgaagaacgctgctaaacaagctggcgctgaaatccttgaacctatcatgaaggttgaagttattgctcctgaagaatatcttggcgatatcatgggacaagtaactgctcgtcgtggtgctgttgaaggtatggaagcacgtggtaatgcccaaatcgttaatgcaatggtaccattgtcagaaatgtttggttatgcgacaacattacgttcagctacacaaggtcgtgggacatttacaatggtatttgaccactactcagctgttcctaagagcatccaagaagaaatcatcaagaagaacggtggccaataagccgctaatcttaagtgattggtttcgattggaaaaggactcgtcattgcgacgagtcctttttttgtgcgtaaaaatgcgattttacagtttcgtaaatgaaagttcatatttaattcataactggttggtattctgtatacatcagatgaattcctcccaagaaataatctgaaaaggtaaaaatgcttttcaaggtggttagcttttgagcataatatagcgaggataatgagcaacgaaggtgatcgttgtcttcgcgtagttaggcggaaaaagttaccttgaaaagcaagattaaatgaattttcattagacaattcctccctaaagaatccgtctaagtaaagcaccgccaatgagttatagtttaatggtaaaacgaaccggcccatttgaaattcctcccaagaacagtgaatggttttctggtgattgatagagacttgctttcgaaggcgcaaggatttgttgatcattaagactggttcatgcgggttcaatccccgctaactcgatttgccaccgccctggcaaaaaactcaaactctttttcatataaacttctccaaaaaagggagttacgacaaaaatcacttttgtcgtaactccctttttgtgtttctaggcacggcttactgagttagttttgttttgtaggacgtgttttcaaactgcccatcagacgtttaacctttgcttgttcgatttcgcgggcggatagttgactatagtccgcttcgatagccagtttattgaaatcagctagccgttcaggcattaatgaacctgcatcgattgcggctcgtacggcgcaaccgggttcgctttgatgctggcaatccttaaatcgacagtcctgtgcgagcgtctcaatatcagtaaagactgtcttgagtgccttagacatgctacttgtcatgccgagttcgcgcatgccaggagtatcgacgatgaaggccccgctagcagtttgataggcttgtcgattggtggttgtgtggcgccccttatcatcgtcagcgcgaatgccgctcgttaaaacggaaggctctttaatgagctggttgatcagggttgatttaccaacgccggatgagccgacaaatgtcacccattgtccagctgttaaatacggtttgaaagtcgctgcaacatttgatgccgtctggccagttgtgatgacgggaacgctgtcgaatgtcacacttgcgatggcgtcaagaaaggttgttagctcagagtcgctgactaaatcggttttactcaaaacaatcaccggtgttgcgccactatcccaagccatcgttaaatagcgttgtaagcgcgcttcgctgaattcttgattggcagatgttacgatgaaaatcgttgcaatattggccgctaaagtttgaatccgttgttgcttattactgttgtgtcgttgaataagcgtgtgccgggggagatgtccttggatttggaaataatccgtatcatagatcacgccggttacttgatcaccgacaacgggcaggtcgttagtgctttctgccaagtggcgataccgaccgctgattgttgcggttaattcttgatgattgagtaggactttgtaatggccttggctttgaaaaattaaaaaagctgtttgttgtgtttacatgatgatgcgcctccagtgtgttatttcatgatgatctaaatgaaataatggcggcactggctatctaagcagcgaataccgccattgatagcacaattgctgtgtttgtttttaacataaaaagaatctcctttatatagaatgggtacattgtcccgtcatttaagataacagatgatcgttaaaagtcaaattagataattgtagctccgaggctgtttttaaaatgcgcgagtgcccattcttgcccgttcggtgtaaaagttgcgacagcagcggctggaattgttagtgggtaatttaagttgtatgccgagactgcagtgtggagcacgcaaatgtcggtgcaaacgccagtcagtgttaacgcgtcaatctcgcgctcgcgtaagaaattatccagattagtgttagcaaatgctgaatagcgattctttgcaaatgcatagacgtgaggatcggtttggtgcttggtgtaccagctagctagtggtccgtaaaactcacggccccaagtattggctagattatgtggtgggaatagggcgctctctggatgaaatggatcatccttgacgtgtaaatcagtcggtaagatgacgtaatcaccggctgctaggaactggttagctaattcgataattacaggaacgatttgctgagcgggtttgccggctgtcagagcaccgtttgggtcaacgaagtcatttgtatagtcgataatcaaaagtgcgttatgggacatgataaggacctcctggaggggatttaagttgctttcagtgtatcaaaacatggctagaaatccacgaatgacgcttgctacaagatttatgaaaatgttatgaaaaactttgataaatcagcaaaaaagggttgcgttatcgggttgtatcttgtaagatagataaagtgctatttccatagcaggagtgcgcaccatggtagtcaaaaagattaccgagtagctaagatgtgagaggttgcgacacacccggccgctttgccatgggcgggcgtgccggaaaaattttcatggagctagtctacttttaaaatagacgaaggagggaaaaacatggcaaaacaaaagattcgtattcgtttgaaagcattcgaacaccgtattttggatcaatcagctgacaagattgtggaaacagcaaagagaacaggtgctactatctctggcccaatcccattaccaactgaaagaacactttatacagtgcttcgttcaccacataagcataaagattcacgtgaacaattcgaaatgcgtacacacaaacgtttaatcgatattgttaaccctacacctaagacagttgattcattgatgaaacttgacttaccaagtggtgtagatatcgaaatcaagctttaattcgtaccaaccaattaaaaatactagaaaagaggtgttaccatgaccacaaaaggaatcttaggtagaaaagtaggtatgacacaagtctttactgaaaacggcgaattaattcccgtaacagttatcaaagcaactccaaacgttgttttacaagttaaaacaaacgaaacagacggctatgaagccatccaagttggttttgaagataaacgtgaagtcttgtcaaacaaacctgctaaaggtcatgtagcaaaagcaaatactactcctaagcgcttcattagagaattcagagatgtcgcattaggagattacgaagtaggaacagaaatcaaagttgatactttcgcagccggcgacgtcgttgacgttactggtgtaacgaaaggtcatggtttccaaggtaacattaaaaaagacggacaatcacgtgggcctatgggtcacggttctcgttaccaccgtcgtcctggttcaatgggtgctgttatcaaccgtgtcttcaagggtaaattattacctggacgcatgggtaacaaccaacgtactgttcaaaaccttgtggttgtaagtacagatgttgaaaagaacgttatccttgttaaaggtaacgtgccaggtgctaaaaactcaatgattacaatcaaaacagctgttaaagctcgtaacaaataatctgagaagggaggattttaccaatggcaaacgtaacattatttaaacaagatggtagccaaaatgggaacgttgaattaaacgactcaatctgggctatcgaacctaacgaaaacgttgtgtttgatgcaatcatcatgcaacgtgcttcattaagacaaggaacacacgctgttaagaacagatcagctgttcgtggtggtggtcgtaaaccttggcgtcaaaaaggtacaggtcgtgctcgtcaaggctcaatccgttcacctcaatggcgtggtggtggtaccgtatttggtcctacacctcgttcatacagctacaaattacctcgtaaagtacgtcgtcttgcaatcaagtcagtactttcacaaaaggttatcgacaatgatttagttgttgtagatgcattcaactttgacgcacctaagactaaagaattcgctgaagtacttaacaagttagacgttaatactaaagcattggtagtacttgaagacggaaatgattttgctgcattatcagctcgcaacttacctaacgtaaccgttgtagctgctgatggtatcaacgtattagacgttgttggcaaccaaaaattaatccttactcaagctgctctttctaaaattgaggaggtgcttgcataatggaagcacgcgatgttattttacgcccagtagttactgaaaattcaatggctgcaatggacgacaagaaatacacatttgatgttgatgttcgtgccaacaaaacacaagtgcgttacgcaatcgaagaaatctttggtgtaaacgttaaaaacgtaaacatcatgaacgttcgtggcaagttaaaacgtcaaggtcgctatgctggctatactaaaaaacgccgtaaagcaatcgttactttaactgctgattcaaaagaaatcaagattttcgaagattaagcaacacttaaatagaataattataggagggtatacacgtgggaattattaagtacaaaccaaccacaaatggtcgtcgtaatatgaccagctcagattttgctgagatcacaaagacaacccctgaaaagacgttgttggaatcccaaagccatactgctggtcgtaatgcacatggtcatatcactgttcgtcatcgtggcggcggtcataagcaaaaataccgtgtcatcgacttcaaacgtatcaaagatggtatcaaagcgactgttaagtcaattgaatacgatccaaacagaacttcaaatattgcattaatccaatatccagatggtatcaaagcatacatcatcgctcctaaaggtcttgaagtaggcatggttgttgaatctggtgtggatgccgatatcaaagtaggtaacgcattaccattagctaatattcctgatggtacacttatccataatgtcgaattaaaacctggtaaaggcggccaattggttcgttcagctggtacatcagctcaattattaggtaaagaaggcaaatacgctatcgttcgtttaacttctggcgaaacacgtatgatcctacttacatgtcgtgcaacgatcggtactgttggtaacggtcaacacgaattaatcaagattggtaaagctggccgtaaacgttggatgggtatccgtcctacagttcgtgggtcagtaatgaaccctaacgatcatcctcatggtggtggtgaaggtaaagctccaatcggtcgtccttctcctatgtctccatggggtaagaagacgcttggtaagaagactcgtagtagtaaggctcgttcagagaaacttattattcgtcatcgtaaatcaagataatcaattccaattgaacatgtctaaagccaatgcggcttaaacataagtcacattgaactttttattcgaaggaggtttcataatgagtcgtagtttgaaaaaaggaccattcgcagacgcacacttgctcaacaagattgaagcacaagccgatagcgaaaagaaacaagtcatcaagacttggtcccgtcgctcgacaattttccctagctttattggctacacaatcgctgtttatgacggacggaaacacgttcccgttttcatctcagacgatatggtaggccataaattaggtgaattcgtaccaacaagaactttccatggtcatggaaatgacgataagaaaacaaaagcacgctagaaaggaggatgaactcaatggcagatcaaattactagtgcaacagctagcgcaaaatcagttcggatggcagcccgtaaagtacggatggtagtcgacttgattagaggcaagagcgttgcagaagcaattgcaatcttagaatttacaccaagagctgcttcaccagtcgtaatcaaagttttgaaatcagctatcgctaatgcagaacataattacgacttagatgcagaaaacttggtcgttacagaagcttatgctaacgaaggaccaacattgaaacgttttcgtcctcgcgctaaaggctcagcatcaccaatcaacaaacgtacaagtcacatcactgtagttgtatcagaaaaagaagcataaggagggatatcgcgtgggtcaaaagattaatccaaccggttttcgtgttggcgtcatccgtgattgggacgctaaatggtatgcagaaaaagatttcgcaacattcttacacgaagatcttaagattcgtaaatatatcaacacaaaattagctgacgcatctgtctctactattgaaatcgaacgcgctgcaaatcgcgtgaacgtttcaatccatactgctaaacctggtatggtcatcggtaaaggcggttctgaagtagaaaatctacgtaaagaattaaacaacttaacaggtaagaaagtacacatcaacattgtggaaatcaagaaacctgatttagacgctcacttagtaggtgaaggcattgctcgtcaattggaagcacgtgttgctttccgtcgcgctcaacgccaagctatgcaacgtacaatgcgcgctggtgctaagggtattaaaactcaagttgccggccgtttgaacggtgctgacatgtctcgtgtcgaaacacatgctcaaggaactgttcctttgcatacgctacgtgcagacatcgattattcatgggacgaagccatgactacttacggtaaattaggagttaagacttggatttatcggggcgaagtattacccgctaaagccaacaacaatacgaaaggagggaaataaacatgttagtacctaaacgtgtaaaacatcgtcgtgaattccgtgggaagatgcgcggtgctgcaaaaggtggcaaagaagtcacttttggtgaattcgggctacaagctttagaatcaagttggattaccaaccgtcaaatcgaagctgctcgtgttgccatgactcgttacatgaaacgtggtgggaaagtgtggattaaaattttccctcacaaatcatacactgcaaaaggtgtcggcgttcgaatgggttcaggtaagggtgctcctgctggatgggttgctgtagtaaaacgtgaaaaagtcatgtttgaaatcggcggcgtttctgaagaagttgctcgtgaagcattacgcttggcatcacataaattgccagttaaaactaagatcgtaaaacgcgaggaagtaggtggcgagtcaaatgaaggctaaagatattattgaattaaccactgctgaaatgcttgaaaaagaacaccaatacaaagaagaattattcaatcttcgtttccaacaagctaccggtcaattagaaaataccgcccgcttaaagcaagttcgtcagaacattgcacggattaaaactgtattacgtcaacaagaacttaacaaataataaatggaaaggagctatttactttgagcgaagaaagtcgtaaccatcgtaaagtgtaccaaggccgtgttgtttcagacaaaatggataaaacaattactgtcgtggttgaaacttataaaacacatcctgaatatggtaaacgtgttagatattcaaagaaatattatgcacaagatgacaacaacgaagcaaaagttggcgacgttgtgcgtgttatggaaactcgtcctttgtcacgtacaaaacggttccgtttattagatgtcgttgaaaaagcagttattatctaaatcgttactcaatatatatataagtgacggaaggaggacctataagtgattcaatcagaaagtcgtcttaaggttgctgataactccggtgcccgcgaaattttaactattaaagttttgggtggttcaggtcgcaagactgctaacatcggtgatgttatcgttgcaacaattaaacaggcaacaccaggtggcgttgtcaaaaaaggtgaagttgtcaaagctgttatcgttcgtactaagtcaggtgctcgtcgtgtagacggttcttacatcaagttcgacgaaaacgctgctgttatcatcaatgatgacaagactccaaaaggaacacgtatcttcgggccagttgcacgtgaattgcgtgacagtgatttcatgaagatcgtttccttagcgcctgaagttctataattacagacaaccaaggaggtgcgtatatcaatgttcgttaaaactggtgataaagttaaagtaattagtggtaaagataaaggtaaagaaggtacaatcatcaaagctatgcctaaagaaggccgtgttgttgttgaaggtatcaataccattaaaaagcatgttaagccaaatgctcaaaaccctaatggtgggattgttgacacagaggcaagtatcgatgcttcaaacgttatgctaattgatccatcaaacaacgaagctactcgtgtaggtttcaaagtgattgatggtaagaaagtacgcgtttcaaagaaaactggagaatcaatcgataaataatcttttggggaaaggaggcactttttacatgactaaccgtttaaaagaaaaatatgttaaagaaatgacaccagcgttgatcgaaaagttcaactacacatcaagcatgcaagtacctaagatcgaaaagatcgtacttaacatgggtgttggtgatgctgtttcaaacgctaagaatttggataaagctgttgaagaattaggtttgattgctggtcaaaaaccattaatcacaaaagctaagaaatcaatcgctggtttccgtttacgtgaaggtatgccaatcggcgctaaagtaactttacgtggcgaaagaatgtacgatttcttagataaattagttaacgtatctttacctcgtgttcgtgattttcacggtgttagtgcaaaatcattcgatggtcgcggtaattatacattaggtgtacgcgaacaattgatcttccctgaaatcgattatgataaggtagatcgcgttcgtggtttggatgttgttattgtaacaacttcaaatactgacgaagaagcacgcgaattgttaacacaatttggcatgccatttgctaaataaaaagggaggtcaatttcttggctaaaaaatctttagttgtaaagaatcatcgtccagcaaaattttcaacacaagaatattcacgttgcgaacgttgtggacgtccacattctgtatatcgtaagtttaagctttgccgggtttgcctccgtgaattagctcataagggccaaattccaggcatgaaaaaagcaagctggtaattataaagagtcaataaggaggttaattccacatggtcatgacagatccaatcgcagactatctaacacgtattcgtaatgccaacatggtacatcacgaatcattagaagtccctgcttcacgtatgaaaaaagaaatttctgaaattttgaaacgcgaaggctttatccgcgattacgaagtgattgaagacgacaaacaaggtatcatccgtgtattcttgaaatatggtaagaataacgaacgtgttatctctggtttgaaacggatttcaaaacctggtttacgtaattacgttaaagctaatgatgttcctaaggtattaaacggcttaggcatcgcaattatctcaacaagcaacggtgtcgtaactgacaaagaagctcgtgaaaaggctgccggcggcgaagttctcgcatacgtttggtaatctaaacttaaaataaggaggtgtcataacgtgagtcgtatcggattaaaagtaatcgaagttcctgcaggtgttaccgttactaaagacggtgaaaacatcacagttaagggacctaaaggtgaactaacacgtcatttcagtccagtgattgaaatgcacgaagaaggtaaccttatcaactttacacgtaatagtgaaagtgatcgtgcaatgcacggtactatgcgtgctaacttaaacaacatgatcttgggcgtaacggaaggtttcaagaagacattggatcttatcggtgttggttaccgtgctcaattgaaaggcaagactttagtattgaacgttgggtattcacatccagttgaaatggaagccccagaaggcgttacagtcgaagtcccatcaaacacaaacatcatcatcagcggtattagcaaacaacaagttggccaattcgcagctgaaatccgtgatgttcgtcctccagaaccttacaaaggtaaaggtattcgttatactgatgaatatgttcgccgtaaagaaggtaaaactggtaaataaagcagcctgagctgttaaacgatattaagaggtgaaaattgtgattacaaaaccagacaagaataagacacgtcaaaaacgccatacacgcgttcgtggcaagatctctggtactgctgactgcccacgcttgaacgttttccgttctaacaaaaacatctacgctcaacttattgatgacgtagcgggtgtgacgctagcaagtgcctcaacattagataaagaagtaaaagcagaaggtactaaagtagaacaagcacaacaagttggcgcattagttgcacaacgcgctgttaaagccggccataaagttgttgtttttgatcgtggcggttacttataccacggtcgtatcgaagctttagctacagctgctcgtgaaaacggactagaattctaataaggaggaaaaccatttatgacttacattgatccaactcatttagatttagaagatcgcgttgtttcaatcaaccgtgttacaaaagttgttaaaggtggacgtcgtctacgtttcgcagcaatcgtaatcgttggtgataaagacggtcacgtaggtttcgggacaggtaaagcacaagaagttcctgaagctatccgtaaagccgttgaagacgctaaaaagaatcttatcaatgttcctaaggtcggaacaacattacctcatgaaattattggtcgcttcggcgctggtcgtgttctattaaaaccagctgttgaaggttctggtattgctgccggtggtgctgttcgtgccgtcatggaattagcaggaatcgatgatgtgacaagtaaaacattaggtagcaaaactgctatcaatgttatccgtgccacaattgacggtttaactcgtatgaagactgctgaagaaattgcagaattacgtaatgtatctgtagaaagcttacaaaactaggaggataactgaacatggctaaattaaagattactttaagaaaaagtgctgctcatcgtcttccagaacaacgtaaaatggtcaaagaatttggcttgaaccgagtaaatagttctgtaatcaaaccagatgatgctgcaactcgcggtgtgattttcaaactcgcacatttagtaacagtcgaagaaattaaagactaatttcaacatatattgcaaggaggtgcgcacaataatgaaattacatgaaatgaaacctaacgaaggtgctcgtgacgttcgtaaacgtgtcggccgtggtacttcttcaggtactggtaaaactgctggtcgtggtcaaaaaggccaaaaagctcgtagtaaagtacgtttaggatttgaaggtggacaaatgcctttattccgtcgtatgccaaaacgtggattcaagaatatcaaccgtaaggaatatgctgttgtcaacttaaacgatttaaatcgttttgaagacggtgcagaaattacttcaactgttttaatcgaagcaggcgttgttaagaatgaattatcaggtgttaaattattagcgaatggtgaattaaacaaaaaattgaacattaaggtaagcaagtattctgaagctgcaaaagctgctgtagaagctgctggcggttcaattgaggtgatttaattgctaaagacactcaaaaacgcatttaaagtaaaggaaatccgtagtaagattttgtttactttaggcgttttgatcgtttatcgtttaggtgcacaaattacggtaccaggtgtgaatgctggtgcattgactaagttgggttcaactggtttgatcccattgcttgataccgtaagtggtggtggcttggcgaactattccatcttctcgatgggggtttcaccattcatcactgcccaaattgtggttcaattactacaaatggatattgtgcctaagtttgttgaatggagcaagcaaggtgaagttgggcgacgtaagcttaaccaagtaacgcgttacttaaccatcatcttagcgtttatccaatcgatagggattaccgctggctttaactcactcagtcaaatgggcttggttaaagatccggggattaagaccttcgttagcatcgggatcattttaacgggtggtacgatgttaattacatggttgggtgaacagataacggataaaggcttagggaatggtgtgtcaatgatcatctttgcagggatcattgcacgccttccaagcggtctttaccaaatcttccgcgaacaagtcttgaacgcttcaaaaggcgatatgtggaaaggtgtcttattcatcatcggtttgattattgcagtactcgtgattgtcacatttgtgacatgggtccaacaagcaaatcgaaagattccgattcaatatacgcgtcgtgaagctggtgcaggtgaaaatagttacctaccccttaaagttaacgtcgctggtgtgattccggttatcttcgccagttcatttattatgacacctcaaacaatcttaatggccttccaatcaggtcatggtgcagatacttggtttaaagtattatcagatatcttcagcatgcagactgtgacaggttcgattgtttatacggtgctcattgttctctttaccttcttctatgcttttgttcaggttaaccctgaaaaagttgcggagaacttgactaagcaagggagttatatcccaggtgtttggccaggtaaaggtaccgagaagtatctttctagcgtattaatgcgtctttcaactgtcggtgcgttgttccttggggtaattgcattattaccacaattagcagcaaacctcggtggcttaccccaatcaattggtttgggtgggacgagtttactaatcgttgttggtgttgcgcttgaaagcacacgtcaactcgaagggttacttatgaaacgcaagtatgttggattcattcgataagcaattatcgtttaaaaagtattgaatcctggttttaaataggaggcaaaggcatgaatctcatgttaatgggacttcccggcgctggtaagggaacgcaagctgaaaagattgttgacgcttatcatattccacacatttcaactggtgacatgttcagagctgctatggcagatcaaacagaacttggggttaaagctaagtcattcatcgataaaggtgaattggtaccagatgatgtgaccaacggaattgttgaggaacgtcttgcacaagcagatactaatgtaggttatctccttgatggttttcctcggactcttgatcaggcggatgctttagctgccattactgataaattgaacaaacctttagatggtgtgattaacattgatgttgatcctgaaatcttggctgatcgtttatctggccgctttatttgtaaaaattgtggtgcaacgtaccacaaactttaccatccaactaaagtggaaggtacatgtgatcgttgcggcgaacatgttttcttccaacgagaagacgacaaacctgaaacggttaagaatcgcttaaaggtcaatatcgaaatgaatacacctttacttgattattatgaaaaacgtaacctactttacacggtagatgggaatcaagaaattgatgatgtgttctctgccgttcaaaaagtacttgataccattaaagactagtcatcaactcaagtgatctcacggtcattgttcacgtaaaagcctgactagttgtttaatgacagaattctcagtgcttttaaaaatttaatacttgtgatataatatctcggtatgaccactagcggtgagcgcggagagctctcaccatttttctgtatgaattttcacaaccacaagggggtacttttgcgtggcaaaagatgacgtcattgaaattgaaggtaaagtaactgatactttaccaaatgcaatgtttaaagtagaacttgaaaatggtgcagttattctggcacacgtttctggtaaaatccgtaagaactacatcaagattttacctggagaccgtgtgacagttgaattgtcaccctatgatttgactaagggacgaattacgtatcgctttaaataggcgtaaggatcatatcaaggaggtcagtcgatatgaaagtaagaccatcagtaaaaccaatgtgcgaacattgtaaagttatcaaacgaaaaggccgcgttatgattatctgcgcagctaacccaaaacataaacaacgtcaaggttaatattaattaagcaggaggtgcaagaatggcacgtatcgcaggtgtggatttaccacgtgataaacaaattgtgattgctttaacttatattttcggtatcggaaatacaactgccgttaaagtcttggctgatgctggcgtcgcagaagacgtccgtactcgtgatttaacgccggatcaagaagacaagatccgtgcagcaatcgacaaagttaaagttgaaggcgatcttcgtcgtgaagttagcttaaacatcaaacgtctacaagaaatcggttcttatcgtggcatgcgtcatcgtcgtggattaccagttcgtggtcaaaacacgaagaacaacgcacgtactcgtaaaggtaagaaagttacgattgcaggcaagaagaaataatcagtaaaaggaggttataatttatggcaaacaagaaaaatgctccacgtaagcgtcgtgtgaagaaaaatatcgaagccggcgttgcacatattcactcaacatttaacaatactcttgtgatgatcactgatcctcatgggaatgctgttgcatggtcatctgctggttcattaggtttcaaaggtagtcgtaagtcaacaccttttgctgctcaaatggctgcagaagctgctggtaaagaagccatggaacatggtatgaaatctgttgaagttgctgttaaaggaccaggttctggccgtgaagctgcaattcgctcattacaagcaactggtttagaagttactgctattcgtgacgttacaccagttcctcataatggatctcgtcctccaaaacgccgtcgtgtttagtctgggctacgcttcattttgagacaaactgaaacgtgttcacgtataaacacttctcgttttgaaaggggtaaaagataagaatgatcgaatttgaaaaaccaaacattacaaaggttgatgaaagtactaactacggtaagttcgttgtagaaccacttgaacgtggctatggtacgactttaggtaactctttacgtcgtattttactcgcttctttaccaggtactgctgtcacagatattcaaattgatggtgttttacatgaattttcaacaattgatggcgtcctagaagacgtaacacaaatcatcttgaatattaaaaaattagcacttaaattgcatgttgaagaagacaagacaattgaaatcgatgttaagggtccggcaacagttactgctgctgatatcatttctgatgatgacgttgaagtcttaaatactgatcaatatatttgtacagtagctgaaggcggcaatttccacgtgcgaatgacagttaaaaaaggccgtggttatgttgctgctgatcaaaacaagtcagacgatatgccaattggtgttttgccaatcgactcaatttataccccaatcagtcgtgtcaactatcaagtagaaagtacacgtgttggtcgtcgtaacgatttcgacaagttaacacttgatgtttggacaaacggttccatcagtcctagagaagctattagcttagctgcgaagattatgacagagcatttggcaatctttgtagatcttactgatgaagcgaaaaatgctgaaatcatggtcgaaaaagaagagacacataaagagaaaatgcttgaaatgacaattgaagagttagatttatcagttcgttcatacaactgtttgaaacgcgctggaatcaacactgttcaagagttaactgacaaatcagaagcagatatgatgaaagttagaaatcttggtcgcaagtcgttagaagaagttaagaacaagttatttgatcttggcttaggcttacgcacagaagaataaactgataagaaggagggactccattcatgagttatcgtaaattaggtcgcacaagctcacaacgtaaggcaatgttacgtgatttgacaactgatttaatcatcaatgaacgtatcattactacagaagctcgtgccaaagaaattcgtaaaacaactgaaaaaatgatcactttaggtaaacgcggtgatttacacgctcgtcgtcaagctgcagcattcgttcgtaacgaagtagctgatattcgcgaagaagacgatgctgtaatcgttcaatctgctttacaaaaattatttagtgacattgctccacgttatgctgaaagaaatggtggttacacacgtattcttaaaacagcccctcgtcgtggtgacggtgcattaatggtgattattgaacttgtttaatcacaaaatgatttaggtcatttgatcgatgagacagggcgttatgatgatggaagtactccgagtctagtcctaaggtcatactagcaacacagtatggctttcatcgattgatgatttacataaaataacgtctaattccgagttaaatcggagttagacgttttttgtgttggatatcctttgaataaagggtgactaacgaaagcgctatggccttttatatgataaaataggaacaggtttttgatttgaaacgtgcatggataacataaccaatgcactttaattccaaggaaaatacgggttattaatcatgaatgagcaaaaaataattcaagttgaacatttaaaatatgaatacccacaatctgaaggacatttagcactgaatgatctttctgtcagtatcaatgccggcgaatgggtcgccattatcggtcataacggtagtggtaagagtaccttcgcgaaatcattgaacggtttgttagatttacaatcgggatcagtgacgattgatgggttaccattgtcgttggataacgtgtggactattcgccagaaaattggcatggtttttcagaatccggataatcaatttgtcggtgcaacggttgaagacgatgttgcttttggtctcgaaaatcaggggattccgcgagctgaaatgattgaacgggttaaagacgcggttgaacgtgttggtatgagtgaatacttgaaacgtgaaccaagccgtttgtcgggtggccaaaaacaacgagtggccttagcagggatcatcgcacaacaacctgagattctgattctcgatgaggccaccagtatgctagatccaaaagggcgcgaagaagttctcgcaaccattcataagttaaaacaagaaacaaacatgaccgtgttatcaattacccacgatattgacgaagccgcaagtgcggaccggatcattatcttagataaggggcaagtgcatgatcagggcacaccggccgatatttttgcatatgggcaacgtttgcttgatttagggttagatgttccatatccagaaaaacttaaagcagcgctaaatgaacgcgctatcgagatgcccacagattatctcacaacggaaaggatggttgagtacttatggacattacattcaaaaatgtaagctacacttatcagccaggcacgccttttcaagggattgggctagaaaatatcaatgtgaccattccaagtggctcctatacggctttgattggtcatacaggcagtggcaagtcgacattgctccaacacctcaatgcactcttaaaaccaacgagcggcgttgttcagattggtgagcgcgaaatcacgcctgagaccaacaacaaaaacttaaaggctgttcgtcaaaaagttgggatggtttttcaatttcctgaaagccaattatttgagtcgacggtgcaaaaagatattgcttttggtccgcagaacttcggtgtccctgaagctgaagcacttgaacgcgctaaagagatgattgaactcgtcggtttacccgctaacgtgattgacaagtcaccttttgatttatctggtgggcaaatgcgccgcgttgccattgctggtgtgttggcaatgaaaccggaagtattggtcttagatgaaccaaccgcggggctcgatccagttggccggcgtgagatgatggcgctttttgaaaagttacacagtgagcaggggatgacgattgtgatggtcacccatcagatggatgatgtggcgaactacgccgacaacgttatcgttttggaacatggcaagctagctaagaccggagcaccacgcgaaatttttgcggatccggattggttaacggaaaaacaacttggcttaccaacaacgactcagttcgcgcaagctttaatgcgacaaggctttgtctttgatcaagtaccactaaccgaacatgaattggccgccttattagcggaacaactaccgaagaaggcggggattggacatgaataaattaattctgggccgatatatccccggtgattctgtgttacaccggatggatccacgggcgaagttattagccagtttttattatattgggatcatctttttagcgcgtacatggcaagcctacgctttattactggtctttacgttagcgctaatcgggatttcaaaaattaaactcgacttctttattaaaggggttaagccgctgttatggctaattctatttacagtgctcttacagattttcttcacccgtggtggtcatgtctattggcagtggggatttctgacgcttacccagtacgggctgattaatggcgtctacatcttcatgcgctttgtattgattattttcatgtcgactctcctgacattgacgacgccgccattgtcgttagcggatgcgattgaatcaattctcaagccgcttaaagtagtccattttccagtgtatgaagttgcattgatgctatcaattgcattgcgctttgtaccaacattgatggatgaaaccactaagattatggatgcgcaacgtgcgcgtggggttgattttggtgaagggaatttattccaacaaatgaaagcaatcgtgccgattttaattccgttatttgtcagcagttttaaccgcgcggatgatttagcaacggcaatggaagcacgggggtaccaaggtggcgaaggccgcagtaagtaccgaattttgaaatggcggacaagagacaccgtggcatttatcacgatgggccttttaaccgtcgcacttttattcttaagataacgcaaaaaggactcagttaaaccaacggaggttgatttagctgagtcctttttttttgcacttttttgattagcttgttttttgaactgacgtttcaacgttgaagcactaatgccagtttggtaactaatttgagcgtacgtaaagccctcttcacgcatgtctagggctgcttgtatgttcatcatcagtataggtcgttttacgaccttcagtgtaactagggttggtgacacgagcattatggttcccttcctgggtacgagtgagaatcatatcgcgctcaaattgcgcaaaagcactaaataaggtaaaaatgagtcgtccggaaggggtgtcttcaatgatgcccatgttcaaaatatgaattttaatgcgggctttaaaaagttcttggatgatttcaagtgcttctttggtatttcttgcgaagcgatcaagttttgtaacaacgatggtatcaccacttgaaacccgatctaatagttcattaaatttagggcgatcaacggtagttccggtaaacttttcgctgtagataatgtcacagctttcttcctttaattgactaatctgggttgctagactttgtccggcagatgaaacgcgtgcgtatccgaacttcattgcacaattctccttatttctacttataataattatacagcatttgaacttgttttatattaaaaatgcatttttaaatcaaattttttacgaacattcataaaaagattgctacttttcagaaaattatttagaatagaactactaactttttaacacaagagggataaaatgacacaacggtatcgcgtaacaattgcctatgatggaacggattttgcgggtttccaagtgcaaccgaaccaacgaacagtacagggcacattagaaaaagcactgacaaagatgagtaagggtgcttatattcaagtgtatggttcagggcggacggacgcaggtgtccatgcaacggggcaggtggtccatttcgactatccaggtcaattacccgctattagtatgttacgggccttaaatagcctcttaccgcttgatatggaggttgtggatagtcagttagcggatgatgactttcatgcacgattttcaacggtcggtaaacggtatatgtatcgggtcgatcttgggcattatacgaatccattcaagcgacgttataccggtcattatccatatccaatcgatgtggaacggattcaagcggcgctgccagatgtgatgggcacgcatgattatacgagttttgcggcttcaggtggggttattaaggataaggtgcggacgatttatgatgcgaccgttgttttcaatgaatccgaaaatgaactcgtttttgagttttatgggaacggctttttgtataacatggtgcggatcttggtcggaactttattagaaattggtaacggccggcgggatgtccacgattttttacggctgtatgaagttaaggaccgtcaacaagctcgctcaaccgcgccagcaagcggtttgtaccttaaaaaagtttattacgaaactgatgaaaataattgagattcaattgacttaatcgtgaaattacgatactatagtatctggtattgtttgccccacgataggccccggaaacttattgagtgtcaaacaaacacagaatattggaggaataaatcgtgcgtacaacttacatggctaaaccaggcgaagtagaacgtaaatggtatgtgatcgatgcaactgatattgcattaggtcgtctatcaactgtagtcgcttctatcttacgcggtaaaaataaaccaacatttacacctaacgttgatacaggtgataacatcatcgtcatcaacgctgaaaaaattaaattaacaggtcgcaaagcaaccgacaagttatatcatcaccatagtaaccatcctggtggtttgaaaactcggactgctggcgaaattcgtgaaaacaacccagaacgtttaattgaaatgtcagttaaagggatgttacctaagaactcattgggtcacaaccaattcttgaagttacacgtttacgctggtggcgaacacaaacaccaagcacaaaatccagaagtcttagacattacggacattatttaaggaggaaactatagtggctcaagtaacttataacggtacaggccgtcgtaaaaactcagtagctcgtgtacgtttagtaccaggtactggtaaaatcactatcaacaacaaagacgttgttgattacattccatttgctaacttgattttagatatgaaacaacctttaacaattactgaaacaacagatagctatgatatcttggtaaacgttaatggtggtggattctcaggccaagctggtgcaatccgtcacggtatttcacgtgccctattgacagttgaccctgacttccgtccagctcttaagagcgctggcatgttaacacgtgaccctcgtatgaaggaacgtaagaaaccaggtcttaagaaagctcgtaaagcttcacaattcagtaaacgttaatatcacttttatatcaatgtttacaagcacctcgcaattttatattgcggggtgtttttttgtttttgacaccatcagactttttaagtgtaagcctaatgcgccatcccagcctattcccaatatttttgctatgcttagagtaattgaaggaggcttttttatgtatcgttatgccgttatttataatccccactctgggcacaacaatggtgagtcggttggtcagaaaattgagcaggcactcatcaagaatcaacacaaggtcgaactgatgccgacggaagggccgaaagatgcaacgcggttagctaaaaaagcggcgcgggcaggctttgatgtggtggtcgctgtcggcggggatgggaccattaatgaagtcgttagtggtcttgcgacgttagatcagccgccttatttaggcattgtacctgctgggaccgtgaataatttggcgcggatgttacaaatcccgttggacattgatcaagcgattgaaaatctgcagcaggttcatctgcgcccactcgacgtcggccaagtgaacgatgattacttgattagtacaatgacgctgggtatcttggcggatgccgcgttgaacgtgactcagagtgaaaaacaaaaatgggggccgctagcttttttaagcaaaggcatccatgcattagcggagcatcagcattatccgctaacgattgaaacgcctgatcggcactggcaaaaagacacgcaattcttgctggtgaccctcacgaattccgttggtggatttaccaacttcaatcccgaagcgcaacccgatgatggttatttccatgtcttcgttgcgccgaaaatgtcgctagcacggtcagtgatgtttctcccttatttcttaacgggtaattttaaaaagattcccgggatgacttactttaaagcgaatgaaatcagcatcacagtcgacaatcagcaaagtgcacaaacccgcattgatggtgatccgagtgccaagtcaccattggagatgcgactcttagaacataagttgcaagtgattacgcctaatccggatttataagaccaggggaggttaagatcatcggtaaaacaaaaaagaattcaaaattttctaacgaaaattccgaattcttttttaattattgcgttaattcagcttgtttggccgcaacgcgttcactaatcttcaggaatggccagtagattagaacgccgaggattaaagtgaagccttgaatcacaggggcgcgccaatcgccgccggttgctaaatatgagttgagtaatggtggtgtggtccaaggtaccatgacgaccactcgattcatccagccaattgcggtgaagaagtaggcaatactgatgccaagtcctggcattaggacaaatggaatgatgagcgcaaagttgaagacaattggataaccgaaaataacaggttcgttaatgttaaataaacttgggacgaatgatagctttgtaatatcacgactagcgcgtgattttgagaagagcaaggtcgcaatcaataaacaaatagtactaccggtaccaccaagcatcccaaatgtatcgcggaaaacgttgttgatgatataagggatgtgttgaccagctgcgtaagctgccatatttttgttcatgttgatcagtaagactggatccaataaagtaccgttaatgacagcttgatggatcccaaatgagaagaggagattaccagtcccgtaaatcaaaaggagacccggtaaacttgtattaacgcgccgaagtggttcttgaatcacatttgtaattaaagtgatgagatcagtgtggaaaccagccgttaaaatcgcagcaagtgccgcaaaaagactcattgtaatgagggctggaatcattgtgttgaaggaaccagcaacagctgatgggacggcatcactcaagttaatctgtaattttttaagctttgaaagagtcataaagagttctgttgcgactaaaccaataataatgccggcaaacatcccggttgttcccacgttttggaaagttaagacgccagaaacttcgacggctttcttggcagctagtggtgtgaccggaacagtattaggcatcatgatgattaaagtccctagtgccatgacagccgcggaaattttgttgacgtaattcttattacgtgctaaacagtagccgattgtgggtgcgagtaatagcccagcaacgttcaaagtcccattggtaatgtaagtgccgaagtattgaaagttggttagcatttggccgtggaggaccaaggggaatacaacgttattcacgagcaccccaattccggcgaggatgaatagtggcataataatcgcgaaggcatcacgtaatgaacgcaaatgcacttgattcccgattttaaaggcgatatttgtaaactgatcaataaatctttgtcgccgacttccttgtttaagcatagaaaacactccttttaacgcactttttttagtctaattgttcaccgttagattgaatgaccttttgcagccaataaaaactagccttcgggattctagcaaggtctttgaggtcgtgattggttcgattgacgtaaacgacgccatagcgtttattcatatcaccttttgaacttgggatgtcgattaacccccaaccaagatagcccataacgtgagcaccgtcttcatcaactgcgtctttcaaagcctggatatggtcgcggtgataggcaatccgttcgtcatcttgaatcatttcatgattcagcgattcttcgcgaatgccaatcccgttttcgatggggaagatggggaggccagtttcattcgaaagtttcgttaagacatttctaaaaccgagggcgtcaatctgccagccccattcgctactttctaaataaggattagggacactcgcatcgcgcatgtaataattgggtggtgtagtgggtgttaattttgtgtgatcgagtgcgacagtgtagtagtaactgaacgctaagaagtcgttgtgatgacttgcaatgagcgctaaatcaccaggctgaatactgctcattaagtcatgattttgcatatattgcagtacttcggctgaatagtgacctttagtaaaggcgtcaacgaaatgttggttgataaattctgatgcttttctagcagcaaaaacatcttggggatgactggttgcaggatagaattcttgataggccaacatcccaccaatttggtcattaggatagtgggcatgtaagtaattggcaatctcagcatgcgcaaccatcgtattattagcgatcgtataaagcgttaataagtcgcgttcaccattgataaagccagtattatcaaagccaggttcaaagaaaaaaccattttgttcattaaaacttaaccaatatttgacttgttcaccataacggtcaatgacagccttagcgaacttagtgaatgcttgtgtgacataccgacttgagaaaccattatatttttcagcaagatgcaaaggcatgtcaaaatggtacaggcaaatcatcggttcaatgcccgctttgagcaaagctgatatcaatcgatcataataatcgaatcccgctaaattaatttcaccatcaccatttgggaaaatgcgcgtccatgaaatttggaaacgatagcagttcatacccatctgttgcattaaatcgatatcttcttgataacggtggaattcatcaattcccactttccaatccgataaatcagctgtctcaggtttcacatcgtacactgataaacctttgccatcagcatcccaggcaccttcactttgcatacttgatacagaattgccccataaaaaatgcttatctaatgtcattatggtacctccattacttgaatgattttatgatagcgcttttaatataacttgtaaagtcatattttataatttgaacaacgaatattccgaatctgaatatgctataataaccatatcaaatggtaggtggttactatggcaaagtataaggatattgcggcaacgattcgcaaccgaattttagaaggacaatattcagctgatggcccgcttcctgaacagaagaagttagcccaagaattcgaaacatcaagaatgaccattcaaaaagcacttgaaatgctaacttatgaagggctcatttatagtgaacaagggcgtggcacgtttatcaaatcaaacgtttccgcgctatcacaattagatgcgactgtgaatcaatatgtagggacgactaagctgtttgccggaaaggccacagtaaagagtgatattctaaagaatgaattgcgattaccggatgcagaagaacaagaaaagcttcagttagctaaaacagaagcggtctatgacgttgttcgactccgatttttaaacgaagtaccctatagtattgagcattcgatcatgccagctaagattttaggggaattaacagacacagtacttaagaagtcgatctacgaatacttggaacaaacattgcatctaaagattggcgtggcttaccggcgaattagtgccgatcaaccgaatcaaatggatcaagaatacctgcactgcaaaccagtcgaacctgtcttacaagttacccagacagtctttctacaaaacgggctgccttttgaatactcaaccacacgacatcgatatgatatggggagtattacaaccattacacaagggaatcattaataaaatgacctcactcagttaatgagtgaggctttttttgttgcattgatttgaagttgttgacaaaaattcacatcaatggtttaatggtttaaacttaagaaccattaaaataaaaccggagattaatgtatgaatgaaatgaaggttattaaacagagctttgctgagctgagcccgtttttgacggcgcttggggatgagaagcggcagagtattattttagaattgatggctgataaagcttgtgatggcttacaggtcacggatttaatggcggcgtcggacttgtcgcgcccggcagtgtcgcatcatttgaaagtgttgaaggaagccaacttggtcgactttagacgcgaaggcacgaagaactattattacttgcaacacgaactgggcgaaatcaatcaactaaaaacactgctggatcagattacggcagtcatcgaaaaacaacagtaaaaggagtttttaaaatgcaaaccatcttaggtagtagcggtcagattggccaagagttagccaaggcacttcataaggacttcacaacggacattcgactggtcagtcggaatccaaaaaagtgaacgcgaacgatcaactatttccagcaaacttgctcgacgccgcccaaactgatcgtgcggttgcaggcagtgaaattgtttattttaccgctggcttaccgatgaattcagacatgtgggaagcacaatttcacattatgatgactaacgtgattaacgcgtgcgtcgcgcacaaggccaagctcgtctttttcgataatacctatatgtatgcgaaaaatagcacgctccagacagaagcgagtccttttgaacccgttggccgtaaagcggttgtccgagcggagatcgcacagttgttacttgataagatggcaactggcgcaattgaagcggtcatttgtcgtgcacctgaattttatggcccaggcaagacgcaaagcattacgaacacaatggtctttaacaatatcaaggcgggcaaaaaggtgcgcgtgccattgaatgatcaagcggttcggacattaatttggacgccagatgcttttggtcaaacgtggcacctcccttgtgatgacggtaaaacatacgccgaaatcatcgcgctagcaggcaccttaacgcatcaaccaatcgactataccgttttaaaaatgtggcagttcaacatcggtagctggttcagcaaaccgctaaaggaattaaaagaactcctacctagatatgaagtagataatctgttcagttcagacaagtttaagaaacggtccccagaatttaaggtgacgacgattgaagaaggggttcaggagattctttaaaaagtcagcctttcgctcgatagactaaccattgttcaatattatataatcgctttaaagtagcgatgttagtcaatcagataaggagcgtggcatgatgaagaaaccttttaataagcaacaagtgaatggtgaaccaaatccggaatttgattccttctttgcggaagtcttaaagaagttgccgcaacaatcggcagctgtgattgcgaagtcttttaaccagtccaaagcattggcggaaaagacgatggcgaagagtcggacacagtttgatggggtctttgaagacttcctagtcggtgtggatgatcagatgcgtaaaaaggcacacaatatcattcacgcagcatcactaacagcagcgattattggctgttcaccaattccattttccgatgcgttcttgttggtgccggttcaattaacgatgatggcgcgtttgcataaactattcggtcaatcttggtcggctagtttgggcaagagcctgtcgaaagaattggtcctcattggcctaggtcggagtgcagtcggtaacattctaaaactggtaccggtcgttggaacggtcaccggagccgcggtcaatgcgaccgttgcgatgtcgattaccgaagcgctcggctggttaacggtcaagatgttgaacgacggcgaggacatcttcaatgatgttgtttcatttaaaaatcaattcagaacgctatttggattgttacggcgtaagtagttatttttcaattgacagaataagaacgaaatgatttaataaacccacatcactaatttttaggaggctaaccaggtgcccaaagtactaattgtccacacgaatgttacgcgttatcaaggaaccaccgatccaaccggattatggctgggggaatccgcagagttcgttgatgaattgcaaaaagcggggattgattacgattttgtcagccctaaaggcggctttgtcccgcttgatccacgggggatgaagtacacggatgaatcaattctgaccatctatgaacaaccggattacgtgcaacgagggttagtcgcaacgctgaagccaagcgatatcaatccagctgactacgctgcgatttactatacgggcggccatggcgtgatgtgggattttcctgataatccagaattacaaacaattgcccgggaaatttataatcacggtggctatcttgcgtccgtttgtcacgggatcgcgggtttactacgcattaaaaatgatgacggtcagtatctgattgctggtaaaaaagtgactgggtttaccactgcagaagaaattattgcgggcaagaaaaaagtggtgctatttttaaaccaagaagtggcaactcaaaacggcgcgcaatttgtgcaaaaacggttttacaaaccatttgctgtccaggatggtcagttgattacggggcaaaacccgttttctgtacgagaagtgacgaagcgcttgattccggccctacaaaataacggttaggcattctttgaattctatgctaatcttatagaatgtagaaaagttaggagtcagaagatgagtgaaaaacaaacaccaaaattaacgcaaaaagaaaaaatgcaagcactaattgatcagaaaaaaggcggcggcagatcaaaacagaccgacgttgctaaaaatgatcggacaaagatgcgcaaagggccaaagatttttaacgaaatccactggtaaagagtgcgtttggttgcggttagcaactgagcattaagctaaaatccgcagtaatccaggttttaggagtactgcggattttagcttaagcggaagttgttgcaaccaaaaagcacgtttcaaacaaagtgcgtttgaaacggtttggttctgagcattaacctaaaaataagcactatggcggtccttgccatagtgcttattttgtagttaagcacaggagccagtttcaaaaagcacgtttttgggctagggcaattttgcgctagccctttttgtgttaacgcgctatgctagaagcaacttattttaaatcgaatggagtctttgtatgtcatctttaatcgaacaaatgcaacaccatgtttcagttcgtgatttcgagccaacacccctcagcacgacagtgaaacaacaactcattggggcagctcaaagtgggtcttcttcgaatttcgttcagccattttcaatcattgaagtgaccgatcccgtaattcgtgatgaaatcgcaacgatttctcaaagtgcggcgtatgttaaacagacggggacgttctatgtttttgtcgcggacttataccgacaagccacactcttagaaaaagcgggccagtcagtagctggcattcaaaatatggaagccttattagtcgcaacggtcgacacagccattgcagcagaggacatggcagtcgctgccgaatcgttagacttaggcatctgttatatcggtgggattcgcaatgacattgcgcgtgtcgctgaactactcgagttgcccgcctataccgtcccactatttgggttaacggtcgggattccgaagactaaaaatcaggttaaaccacgattgccgcaagttaatcaagtcgctcaaaatcaatatgatgtgcatcaggcaaccaacctagtgcaatacgatcaacaaatgcaaaattattatgctaatcgtgggaccaatcagcaacaaactgattggtcgaccaagaatacggccttctttagtgaagtgcgacgaccagcagtggcgagttttttgaaaaaacagggctttacgttgaattaagaaaaaatggtacttatcttaaaggacaatcagttttctgattgtctttttttgtgtcgtgcaagctcggatatgcgataataaaactagtcaaatgtaaccggttaaataggtataggagtgatcgttatgagtttaattgatgtacgacatgtagccaagcggtatcagatgggcgagacaacaatcgtggccaatcatgatattagttttacagtcaatgaaggggagttagcggtgattctcggaccgagtggtgcgggaaaatcgacagtgctgaacatcttaggcgggatggatacacccgatgaagggcaagtgttgattgatggtgtcgatattgcgcagtttagtgcgcgccaattgacggcgtttcgccggactgatgtcgggtttgtgttccaattttacaatttagtgccgaatttaacgacgcaagaaaatgtggcgctggcaacggctgtctcgccgaatgccttagatgttgcgcttgttttgcaacaagttggtctgcaggatcggcttcagaattttccggcccaactatccggtggggagcaacaacgggtggcgattgcgcgggcgcttgctaagaatccgaagctcctcttgtgtgatgaaccaactggcgcactcgattatgaaacgggtaagcagattcttaaattattacaagaagttagtcggcaacaacaccggaccgttgttttgattacgcacaatgccgcgattgcccagatggctgatcgcgtgattcacattaacgatgcgcgcgtgcgttcaattgaagtgaatcccaacccacttccagttgaaaagattgaatggtaggtggttaatatgcagacacgtttatatttacaaaccacattccgcgatattcggcaggcgattggacggttcattgcgattatcctgattattttaatgggtgtcttattgtttgtggggattaaatcgattggcccgaacttagaagagactgtggatcattttgtcaccacgcaacgcgtatccgatttacagattagtgggaccgctggcttaacggaacaggaccgtgcggtggtcgaaaaaatgcatggtgtccaagctgaattgggttatcggattccgtatcgcgatgaagcgcgggatgttaacttacaattatataattaccaaccaactgcacggcaaaatcgcttaacgctgactaccgggcgctatccgcaacgaacgaatgaaattttagtggataacgcggtcaagacgcattatcgtctggggcagagggtgacggttaagagtcagcagctattgacgcaccggtttaaagtggtcggttatgtggactcaccgctatatatcgaccgtcaggaacgtggaaccgtaccggtcggggatggtcagctagatggctttatgtatttgccacaaaaggcatttgcacctcaaccgtattcggtgatgatggtgcgctttagtgatttggatcgtcacagtagctttttacaggcttatcgcaccggcattgcgactaaagaaacacagctcatgcgccaattaaaagcacacacaactcagccgcagcaacagtacttattaactgcgcgcagtgctaatccgggttttaatgaatttacgagcttgtcggatcgcatcgatgcgatagggaatgtctttccggtcttctttttcttaatcgggattctaattacctttacaaccattacgcggatgatcgaagaaaatcgtaaggaaatcgggacattgaaggcactaggctatcgtaattgggaaattgcgcagaagtatttactatatgcgctactaacaggtagtatcggcaccgtgcttggcaccattttgggcacgaagttattaccgctagtcgtctatcgaatccaaaaaccggtctacacctttgcgcattatccaacccatttttggacagttccaattttattagccactggagcggtcttgattgcgacagttggggccacggggtatgttttaatccgcgatttacgcgagaagcccacccaattactccgaccaaaagcgccgaaaccaggccaacggatttggttagaaagaatcacaccgctctggcggcgattgagtttccatcaaaaagtaacttatcgtaatctttttcgctataaagcacggatgattctgaccatcttaggcatcgctgggtgtaccggtttaatggttgcaggctttggtttaaagacgtcaattggcgaagttgctgaccgtcagtttaagcaattgacccattaccaagcaattgtgacgcttaaaataccgaatagtacagcccaaacgaagtcgattttaacacagactgagaaggttcggtcttacttaccggtcacaatgacccaggttaagttcaagcaaaaagggattacggatcaagcggcgacagtctgtgcggtcgctgatcaagcaaaaattgcacagtacgtcgctttgcaaacaccgcgagaacaacaacgactcacattgccgaaacacggtgcgattattgctgcgaacctcgctaaaacatatgctgttcaaaaaggcgattggttaacgctacaaacggcacaggggaaacgtgctcgcattcaagttgcagggatcagtgaaaattatctcggtaatagtgtctatctccgccaatctgctctttcaaaaacgctacaacaaccagttgcggctaatgcctatctcgtgcgcaccgctaagatgactaccaagcaagaaaaacagttggcgacccgtttgcaacaaacaacggaagtggcggccacaacgtttatcagtgatcaaggggctaagcaagcaacggctagtgctaatttagacccaatcgtttttattttcatcgggttatcagcggttttagcgtttgtcgtcttattcaaccttactagcatcaacgtttcagagcgggaacgtgaattggcaacaattaaagtcctgggctttttcgacaaagaagtgacggcctatattgtgcgagaaaatgtaatcttcaccgttgttgggattgtgcttggctttggaatcggtaaattactgacttggttcatcatcacgatggcctcgtcagaacaagtggcctttccactcatcattccagctagcggctacctgattgcggcagggatgacggtgctattctcactgattgtgatggggatgacccatcgcaagttaaaagggattgatatgattggtgcattaaaggagaacgaataaaagttttagcaaataatacttttttacttgcttgtgacgttacgtcatcggctagtatcaaggtatggaggtgatattctatggcgcaatatacaacaggtgaactcgctaaattatgtgatgtttcggtgcggacggtgcaatattacgatcaggccgatttgttgaagccggcaagcttaactgaaaatggacgacggctgtatggggatgcgcaagtgcagacgttaaaagtcattctaggctacaagcagctaggcttttcactgaaggcaattcaaaaagtgatggcgagtcaagcttcgacggatacactggcattgttagtcgaacaacaactcaatcagttagtccaaaaagaaacagacttagctaaccagaaagcagcgttgcagtttgtactgcaatcgattcaaaatactagcgcggtgccttttgaaatgacaatcagcgacatagaagacgcaatggctaaaacaacacagttaaaaagattacatcggcgaatgctgatgtggggcttattgattgatggtgtggaaattggcttattaattcttgggtttctaagtggaatttggtggccaatgtggattgggataccgggcatcattgcgatggccatttatgtgacaacattctactatcaagaaactgtctatctatgtcccaattgcaagacggtcttcaaaccacgcctaagtaaaatgttctttgcccggcacacgccaaagacaagacaactagtgtgtccaagctgtggacaaaaaaattactgcatagaacagagtgcgtaagcaggcgttcgtatttttaggattaactggatttgccgaattggcgacgcaatcgctaatttggcaaatttggttagccacagaaatatgcctgctgaagcacgtttaagaacagagtgcgtttggtcgcggttagcaaatgagcattaagacaaaatcaccagtaatccgtttttggaattactggtgattttagcttaagcggaagttgttgcgaccaaaaagcacgtttgaaccaggcgtgcgcatcaaacccaaaaccatctaagctgggacgatttcgtctcagcttttttgagtcagatactttataatagaagtattacaaaaataaggaatgatgcaaatggaaacgacagtgatcatctcgacgctctttcggttggcaaaagtcttcgatgacatgggtaagttattgttcaaagcgcatttagatgtgccgttgacgtttgaccgtgcgcaatcgcaggccttattacggcgcaataaccgactagaattcagctatcaacaacttaaaacaagtaaaataaaactattaaatcaattattggcgacggcgggagccgatccctatttgtgggccaagttacggcgactgcaggcattggatgtggcgagtttggcagccgttcaagcaaatccgcaatttaaccgccaacgcaagattaatcgtttgaaacaactgattatcaatttacaaaatgaaaaaatcaatgagagtacggtactgacgaagcaggcgctcgcctatttataccatatagcccctgataaagtggcggccacgagtaagccaggaccgatactggccgatccatttgatagccgcgcttttaaaatggacatgatggctcttaattatttagatcagtattttaacgtgcaggaattgcaatattacgtgaagtacctcgtgtttattcatgcgcatcaagcggcggaagcggtgattcactatgatgcgcgaacggttttgccgaatgcggaacaaactggtttttcggcagttgcctattacgtcacgcttaatcgccaatcgtatacctacatttcctacaaggggactgaggggacgatggatgatccgcggattaagtcgtttacgcagcggctggataattatgtccgtgagagttatcaagattggaagtataatattgatgcgatgctgattggcaataccgaaaatgatgagcaactccaactcgcacggcggtttacgcggtatgtggtccggcgggtgcgccgaattaatccggcaacaatcatctatggactgggtcactcactcggggggcattttgtgcagacggtccaattattggatgaaccgtttgatggtggctataccttgaatgctgccccggttcagttaaaacaaataaagcattatcggccggatcttttatccgcttcaaaatggcaacaattattcgcattgactaagcacaacaatacgcaagatccagctgtagcgatgcaagtccacgcgattttggggcacaattacgctacaattgaaaatgaatggttcattaaagatttaacgcggatctattttggctttccgtatacgttctacattgggacggcgcgctatttgaatgctaaaaattggcattacccgtttgtgactgacgtagcaccatatctccgaaaagatgagattcaggcgtatagccagttctggggtaatctaattcgctatttgaaacgtgttgagactagaaatgggtcgttgatgttggcaagtctgatgacatatggactgcagacactccgtgaagtgtatgccgcgattaaaacggaacaggcccaacagatttttgcggcatatgcgcgctatttatacgatgcgcatatttttaaagacacccccgttcaggtacaggccaattttgaacgggaattatcacggccgcgcacggcactccgtgtgttacaaggcgaatggccatttttaaaaagcgtcaacaatgagatggtcgaaacggtgattttcttccacacgattgaaggcgctcaatactttacacgctagacagatgggatgttaactaatggatatttatttgaaacaagcaattttacaagtggtcgaccgcgaactcggcgatccaatttactcacaacaggtgctagatctcaccaatgggaacacacgcgactatttaaccaacaagattaagaaattatcgtctgcccagagtaagaccggcgtgctacgccaagatgctgagctcgcatcttttctgcgcgatgcgacagctgattttatcggcgctagccaacgcctcgttgaaaaatggtacacggtctatcagaaaagtgacgatgcaccgagtgcggatgcgtttgttgtcttgtatgaacaagatgcccaagcttacttggcttttttgaaggtcgattatcatcaagccttcacccattatgtcaatgctgaagaggggccattgatgaatcaactgatcattcaccaatcgattctatcgaataagacccaaaaggcggatgaggggttcgcgattaacctccagacgtttggcttcgaattgatggagaagaagtacaccttctccggtgaaaagatgacctatttatcaacgaacgtgattgaaagcgaaccagcgccatcgctagaagaaaacgtcaaggtcgttaaaaaggccgctgaaaaaatcggcaagaagttcgaagttgccaaacacgatgtggtcgccaacgtcaaagaagccatctacgatacaatcgaaaccaatggtgaaatcgacacgagccagatggcagcgaagatttttaaagacaacgtttcagcccaaagtgagtttaaagcagaaatgacggaaaacgcgccagcagcaccagcgccaatctcaccagccgtccgcgaaatcgccgaaaagaaatacggcaaacaaaaactcaaactctcaaacggcatcgaactaatcgtcccaatcgacgtctaccaaaacccaaatctatttgaattcatcaaccacccagacggcacaatgtcggtggagattaagaatgtagaagaagtgattagtagattatagagtgcgtaggcaagcggttatattttgagcattaactggatttgcccaattggcgatgtaatcgccgattgggtgaatttggttaagtacagaaatatgcttgccgaagcacgtttagagtgcgtttgaagcgggtcgactttgaggattaacctaaaaatgtgacttatgacgggtttggtcataagtcacattttgtagttaaccggaaaagccagtttcgaaaagcacaccaaaaaagagcatttctctcatcctatcgagaaaaacgctcttttactatgcctttctttttgcccagattaaacggataatcttatcgaattccgtgatgattagaatcaagaagcctgcgccgatcgaaacgccccattctaataaggtaagcggttcggtgtagaaggtttgttgcatgaatggcacgtaggtcaggatcaattggagaataatcatcagtgcgataatgccgaatgccttttggttggtgaagaaagcttttgaaaaggcgagtttcgcagtccgaatattgaacaagtagaaaatcttgctgatgacaatgatattgaccatcattgtgctggctgtgacttgatcgacaccgcggccgagtaaccaatcgtaggctaacaagccgattaaggccatcaagacggaaacatatgccatttggaaaacatcgtgtttattcatcagcgcttggccggtcttacgtggcttgcgggtcattaagccatcttcagctggttcgaagatgaaggcgaattgaatcgtaatcgccgagaccatgttaatccagagtaactgcgtcgcttgcaacggcatatcttgttgcatcaaaatcgtgaaggcgatgattaagccttccgcgaaggaagtcgggagtaagaagagaatactctttttgatgttatcgtaaatccggcggccttcacgaattgcgacggacattgttgcgaagttatcgttggttaaaatcatatccgcggaatcttttgcaacatcggttcctttaattcccatggcaaccccgatgtcagcgcgcttcaatgcgggcgcatcattgacaccgtcaccggtcattgcggtgactttgcgactggcttgtaaggcttcgacaatttcgagtttgttatgtggtgtggtgcgggcaaagacttggtgttctaaagcggcttttggtttttcagcgtccgacaagcgatcccattccggcccggtaatcgcattaatcgttggcgctaagcctaacttttcaccaattgctttagccgtcagtggatggtcaccggtaatcatcttgacatcgaccccagcagcgttcatttcggcgagcgcttgaatgacttcatcgcgtggcggatcgataatcccggcaacccctaagagttgaatcccttgttggagttgttcatgggtaattgtagcagtcgttgttggcacgtcgagataaccgaccgccacaacccgtttgccttgttctgataaacgggtcacatcggcattccagtcatcgattgggaaatcgaccattgcctgttgggccattgggaataatttatctggagaccctttgatatagattcggtgcgtaccatcagttagttgcacgagtttagcaatgtagcggtaatccgaatcgaaaggtaacatgtcaatttctgtatttgttggtaagtcgtcgataccatgaaccttatgatataaggttaaaaaggcaccgtcagttggttcaccgttaatggtccaaccattgtcggcttgataaagcgtcgtatcgttggcttcataactagcctctaagaattgtgtgagggtggtatccaattcagcaggttggtcatttaataaaatctgaccttcgggcgcatagccattcccgctgacttggtaagtcgtttcggcggtgataatttcggtcacggtcatttcgtttttagttagcgtccccgttttgtcggtcgcaatcacgtcgacggagcccaacgtttcaacggcaggtaagctcttgacgatggcgtgtttgtgcttggccatgtcgctgacccccattgcgaggattacggacattgttgcgggtaatccttcaggaattgaaccgaccaccatcgtgacaatcgcgattgctaatactgagagtgagtaatgttcgccaagtaagccgaagaggaataaaaagacggccgcaccgatgacgacaaatgaaacgccggtccctaagccgttgatttcgcgagtcaatggggttgggcgggttttcgtttcggtgacagcaactgagatttgcccgatttcggtatcagcggcggttgcgacgaccacgcctaagccgctcccgttagtgacggaagtggaggcaaaggccatgttgacttgatcggcaagggcaacttcttcttcggttaagcgtgttgcaattttttcaactgagtctgcttccccggttaaggctgattcttgaatacgcagattatcggcatcaacgattcgtaaatccgctggtacactatcgccagcttctaggaagataacgtcgccgaccactaagtcttcagttgggatgtcgatccgctgaccgtcacgataaacggttgcttcggttgccaacatttctttgattcgttccaaagcatcagatgcgttcgcttcttgataataaccaatgatggcattaatgatgactactagaccgatgatgatggcatccgaatagtgacccatcatgagtgttaatagggctgcgacgattaggatgtagatgattaagttgttgaattggcgcacgaaaagttgccacttcggggtgtgatggctctcgagtttattcggaccattggttgctaagcggttagccgcttctgtttgcgaaagcccctgttcaaaatcttggtgggcataattggtttgcagttcgtctaatgtttgttgataagcgtgtgttttagtcatggtaagctccttttaattatcgaaagtcaaaatgcggtcgttcgtgatcgttattcttgccgataataaggaataatctgatggattaaacaaaacgcttcgtccgagccgtcatccaaaaatactcacctccagttagttattactctaaaattatcaggaaaaagtagcgatgtcaatctaatgaacactattaccaattcaacgtttaaactttgcgcccagtgcggctttgtggtaatattattacataagttaaaaaaacggttgaagcattgcgcgttcaagatttccttctttagggtggtagaagggaattttggcgtgctttttttatggagggaaatgaatcaatggcaactttagcaattattttaatcagtactttattggcaggacacatgagcaaacggattggaatgccagctgtgattgggcaactcctggtagggattattcttggacccgcgttgttcggtgtcttacatgaaaattcttttatccacacgttttccgaaattggtgtcgtattattgatgttcatcgctggcttggagagtaacctgaccttgttgaagaagtatttcaaaccaagtttagtggtcgccgtcttaggggtgattgtcccggtgatcagtatgtatgggatgagcttggcctttggtattagtcaacttgagagtttattcatcggggtgatttttgcagccacctcagtatcgatttcagtcgaagttttacgtgaattaaacgtgttagaaagtaaagaagggacgattatactaggtgctgcggtagtggatgacttactggccgtaattatcttgagtgtcttgaccagtctttttggggcgcaactggctgcagctagttcaacccacatgagtttggggttgagtttattgctgcaagctttattcatggttgcggtctactttagtgtgaaatggattgtgccatttgttatgcatttgagtcgtcgtttgttagtaccatatgcaagcgccattacatcgttaatcatttgttttggatttgtttggttcgctgaggccgttgaattgagtgcggtagtgggcgcgtttttcgcagggattgcgatttcgcaaaccccgtataaggaagagattaatcgccatattgaaccgattgggtataccgtatttattccggtattctttgtcagcatcggtttatcgatgaacttagcaagcttgaatcaacatattctatttattacgattttaaccgtgttagctgttttctcgaagttaattggaagtggtctcggtgcgcgttggatgaataattcgccacaaggagcctatacaattggtgcggcaatgatttcgcggggcgagatggcgttaattatcgcgcagattgggtacaacgctaaattgttgagtgaactttattactcagagattattttcgtgattatcattaccactgttttggcaccgctgattcttaaacacgcggtgaaacgccaattagcaactgaaatcaattaagaaaaatcgtcagctatttactggcgatttttttttgcccttttttaaagttgacaaaaaaaggattgagcagtacacctatcacgttaagaaaaacatgtatttaattacattatatgaaggcttttaaaaggacaaaacaatttaaagaattagaagatttcttagggacatatttcatttacacttacgataatgggtggaagtatgaatggtatgcaaagaacgaccacacagttgactaccgaattcatggtgggatggttgcaggtcgttgggttcgtgatcaagaagccaacatcgttaagttaacggacggcgtcttcaagattacttggacagaaccaactgggactgatgttgcgttggacttcatgccaaacgaaaacaagttacacggcatgattttcttccctaaatgggttgaagaacatccagaaatcacagtgacctaccaaaatgatcacattgcactcatggaagaatcacgtgaaaaatatgaaacatatcctaagatgttagtgcctgaatttgccacaattacttatatgggtgatgcaggacaaaataacgaagacgtaattagcgaagcaccttatgaaggtatgattgaagatattcaagaaggccggtatttcgatgctgactatcgcaagattcaaaaataggcaagctgcttaactaatcataaatatttactaattatgacaataagtaaatagttgattttataaagcggtttcgttataatgaggtcatggttaaataaattaacgaggtgaactggacatggcgattcaagtaggtgatttagttcgcggccaatcaaacgaaattatgtctgcgacgtatatcggtaaggtcattgagaaatgtgaagaaactgtgcatatcttaatcttgaactatgcaccaactgatcgttttacggttcacgagttgatgcaacgaattctagtgaattcacaacaacttcgggcaatttcgttaacgaaataactccctaataaccatagatttctccctataaaaaaacgaccactcccaagaaaaggtcgttttttttatgcgcaaaaagcggtctaatcacaaaggtggcgcttgcatcttgttgctcgctcacttatagtgaaagataagtgatggcaggaggaatgtgcagtggttgaaaaaagaaagttaattgaaacagatgaaccagcattttatgaattagcacaatatgcgtttaataaaccggatagtgctaagcgccaagaattcttcaaacagttgtatacacatagtgcagggtttggcgtttttgatgacggccggttggcaagtggcttattagcgacgccgtttgacgtacggctcaatgggcaaacctttaagatgagtggcattggttatgtcgcgagttaccccgagtttgcgggcaaaggtgggattgcagcattgatgcaactcgcgtttgaacacatgcgtgcagaaggtgtgacgctttcgtatctcgcgccattttcatacggcttctatcgtcggtttggctatgaacaaacttttgatcagacgcactttgagattcaaacggctgacttaccacgattgaaatttgcaccgagtgcaggacaagtagtacggatgatattggcgcaagcggtgccgttgattgatgcgttcttcaatcagcatccggacaatcaagtcggtggtgtgcagcggactgattggtggtggcaatatgatgttatgaagcatagtgattttgaagtggcggtctatcgagaagatacaggacgggttgcggggtatatgatttatacgcgccaaccagagacgtttgtgattcaagaactgatgacctcgacagttgcaagtcaagaacagctattgagctttattcttaagcatcagtcagcttatgcgacaattcagtatgagagtgcactgactgagtcgctagctgatttattgcctgatcccacaatcgtaaagacgacaaccgtcccttatatgatggcacggattgtgtcactagctgatttcttcgcgcgttatgcctatcaagtagcggaactatctgcggtaacgattgcggttcaagatgatttcttacctgaaaatgccggtttatggcagttaagtattcatgcaggacatgctgctgtgacaaaattagcaacggggaccgcagacatcaccgttacgattcaaaatctaactaaggcgatgttggggtatcgcacacttgagagtcaagcacactttgggcatgtgcaggggacaccgcagcaaatcgctcaactcagtgctgcatttagtcatacgaaaccgatgttatgggattatttctaaattgaacatcaaaaaagccaatcatccaggtgaaatctgaatggttggctttttttgaattaagcaggttggacaatctgcacgttggcatttaagacaccggcagaggggatgtcacaatttggcattgcgacgtctaattgttgtgagttagaagcggcaaatgttccggtgtcgttgacaacacggtaccacacttcaccggtacttaatgtgatcttgatttgtgagccgcgggggataacgcctaagtgcgcagcaaccccagcatacattccgccgggcatgcttgttgcaccaagaactgcgggatcataaaaggttaatttgaatgtccctttgtcaattaaggttggttcggcaggtgctggggccgcaactggttctggctcaggggcgggcgttggttccttaatttctgcggaatcaggatctggatgaatcggacagctaacgggtttgtctgttggtagaacagttgcgtgtttgaccagtgacgtttcagttgcttgggcaggttgccccgtgaattgttcaatggctttagatgacatcagcttttggacagggtggttcgtttctggtactgctccattggtaaatgcggcacgcgcgatattcgttgtaattagcatcagcaatataaggccgatagctaacaagaatggtttgtttttgataataaagcgtcactcctaggtaagttttggaactaggagagtatatcaatgctgcatgtcaattaaatagcagtttctttacagaaatggggtaatttgtcatgttagtcatatgtttgtaaaatttaggagcttaattaaagggcgtcacgatggcgttgatcggcagtaagacgcgaatgggaatgctatcatgacgattactgttaaaatgacaaaaaacagggcaactatcgtaaagatagttgccctgtttttaagaattagatgagaaaatagccgaatacccctaaaatgattaagaataagaagttcatgccagtgaaaacgacaaggaacttaccaaggtctttgccccagcctttcttaaatcgtttgtaagcaatcaagtttgcaagtgaggcaaacattgtgccgaccccaccgatattgatggctaagaacattgcgtggctgtggttagtgaagcttgaaagtaaaatttcagttgggacatttgcaatcaattgacaactgataatcccggtgatgtaagtttgttttgctgttccgacaattgatcgcatgaatgtggcaatcgttgggatgtgacttaaattcccaacagcgatgaagaaacagaagaatgtgagtaataagccgtaatcgactgttttgaataacttaggatcaaacgctagaatcgcgataatcactagaattggtgtcacccataatggaattaatgagaacactgcgaggaaaacgacaaccgttaatggaacgaaataccacagtggccctttttcaacttcaacgggatgtaacccgtgaagtttgatgggttcttttgggaagaggaaggtcgttgctgccaacataatgacgctgacaatcaagacgggaattgaatattcgaagaaatggcgaatcgtcatatggtaaaacgaaacaagaaaaatattatgcgggctcccaaacggtgttaatgaagaaccgaggttagccgaaatcgtgatgagcgtcaccggtaagattggtgaaaattcaagttgacgcgcaattaagatgaataatgggacgaacgttaataccgtcatatcgttggttaagaacatcgcgccgacaaacgttagtgctaataacatctgcatcaaggctcgtttggaacggcttttgataattaattcgcgagcgaagtaatcaagcacgtggagccgttgataaacttgaacgagcgtcataatacaaaagacgctaacgatcacgtggaaattaacgtaactaagttgtgggcggttgaaaaatgaggtgacaatggctgcgatggcagcggctaagagtagtttgtcatctaagaaaaaatctcggatgttcaaagcaatgtttttcatatagattcaattatccttcttaatatagttatattattcaaaaaagcactactacaattctagactgtttacggggataaaaacagaaaaatttacaatatatacacaatttttacaatacatagcctcccattctagtaaacgtggttgactgtctcgcttgacgttagcggtttttaatttgaagaattaagtgattttactgcttattgcggctaaaattaggtataatataaatgaaatataaacgattaatcattattaagaaggtggagcagatgaaagacgccccaagacatacaatcatattagggatagtggccacggtcattgcgtttatttgtggcatgttagttttaaagacgattttgaatttcaatttatggcttgcgattctaatcagtgcagtactaggtttatatgttgggtttaatgcattctatagtacgtatttagcagaaatgatcaaaattgaagtggctaatcaaggattaacaagccaagacttagcgacaatgatgcatggtagggctaaggactatccaattgtccgcggtgaattgcgtctaatcatttctcggcgcaaacgcgcacagctgttagcgaagttgcgtgcacgggttagctaaggcttttgcatgagcgattgttctatgttaggataggactaacttattgaagggtgcgattacatgttaattgaacgaccattaattatgaagcttcgctctgtacatttgaagatgacgcatcgtgcagagcctaatattgattaaaagtcatctataggacattactggatttaacgactggtgacagtggtttatttgggtagtgactatggatggagtggtcgatagtcaatgattgtaatcatgacaggggtagcggatgctgcccctgttttttatttggaaagaaagtaggaataaaacaatgagtattttaaaagtcgaaggcctaacacaacagtttttagataaacaactttatgacgacgccgggtttcaagtgaataaaggcgaacatatggggattaccggccaaaacggggtgggtaagagtacgttaatcaatatcctcacgggcgtcattcttccggatgaagggaaagtgacgtggcaaaagaatcttaagattggttatctcgatcagtatgcgaagttagcaccaggattatcgatctttgaatttttgaagacggcttttgcggatttatataagaaagaaaaattaatgagtcaatattatgcggactacgcagagagccttgatgaccaattgctcgaaaaagcgggtgcgattcaagaactattagaggcaaaaagcttctatgatattgatacacgcgttatgcaagtcgccactggcttggggattgatgcattagggatggatcatgatgtatcacaactaagtggggggcaacggtcgaagattattttagcgaaactactattagaagaacccgatatgttattactggatgaaccaacgaactatttggacacgaaccacattgattggctgagtgattatctcaatcatttcgaaggcgcctttatcacaatctcccatgattatgactttttggaacgggtgacaacatgtatcgccgatatcgaattcggtaagattacgaagtataccggcacactacaacaagccttccggcaaaaggaagagaataaggctagttatttaaaggcctatgagaaccaacaaaagaagattgaaaaaacgaaagcttatatccgcaagtataaagcgggctcccgttcgacaattgccaagagtcgtgagaaacaattggcacatatggatattttgacgccaccaagtaatcgcgtgaaggctaacttccgctttccatatcatgcaacggccagtcagattctattgacgactaatgatttggagattggttacgatcgcgcgttactaccagcgttgaacttttcaattggtcgtgatcagaaggtggtcttgaaaggttttaatgggattgggaaatcaacgttgattaaaacgatcattaaagaaattccagcaatcgatggggactttgagattgccagtacggtgaagtttggttactttaaacaagacttgaagtggccgaataatatggtaacgccattacagtatctacaaggcgaataccctgatcagaaacaaaaggaactacgccaagttttatcgcggactggtttaactgccgaagaagcgatgaagcctttgaaacaacttagtggtggcgaacaatcgaaggtgaagattgccgaactactattaacatcaagcaactttcttctattagatgaaccaacgaaccatttagatgatgatacgaagaatgcactacgaaaagcaatccaagccttcgagggtggcgtactccttgttactcatgaagaagacttctatcaaggtgactggattgataagattttggatgttgaatcactcattaaacaatagggataccgtagagctttgaagggttattggtaacgatgaaacgttgctggtaacttttcaaagcttttttaataaaaagcttgaccgcgtctgttaatcttggtaatatataaaagttgtctcgacgagggacgtatggttgatgactcagcgatacgaaataaaaaagattttaaaaaacgcttgttatttaaaccttatcgtgataatatattatatgttgcttacggagctataacttctaagtaataattaattaaaaatagttgttgacagacgataagttgtgtgatatacttaaaaagctgtttcaacacagtagatctttgaaaactgaacaaagtttcgacaaaccaaatgtgtagggtcgcccttcggggcacaaaacatatttgcaaagtcaatttcgctagcaaataaattaagtaacaaaacaagagctacaaacttttaatcgagagtttgatcctggctcaggacgaacgctggcggcgtgcctaatacatgcaagtcgaacgcactctcgttagattgaagaagctcgcttctgattgataacatttgagtgagtggcggacgggtgagtaacacgtgggtaacctgccctaaagtgggggataacatttggaaacagatgctaataccgcataaaacctagcaccgcatggtgcaaggttgaaagatggtttcggctatcactttaggatggacccgcggtgcattagttagttggtgaggtaaaggctcaccaagaccgtgatgcatagccgacctgagagggtaatcggccacactgggactgagacacggcccagactcctacgggaggcagcagtagggaatcttccacaatggacgaaagtctgatggagcaacgccgcgtgagtgaagaaggttttcggatcgtaaaactctgttgttggagaagaacgtatttgatagtaactgatcaggtagtgacggtatccaaccagaaagccacggctaactacgtgccagcagccgcggtaatacgtaggtggcaagcgttgtccggatttattgggcgtaaagcgagcgcaggcggtttcttaagtctgatgtgaaagccttcggctcaaccgaagaagtgcatcggaaactgggaaacttgagtgcagaagaggacagtggaactccatgtgtagcggtgaaatgcgtagatatatggaagaacaccagtggcgaaggcggctgtctggtctgtaactgacgctgaggctcgaaagcatgggtagcaaacaggattagataccctggtagtccatgccgtaaacgatgagtgctaggtgttggagggtttccgcccttcagtgccgcagctaacgcattaagcactccgcctggggagtacgaccgcaaggttgaaactcaaaggaattgacgggggcccgcacaagcggtggagcatgtggtttaattcgaagcaacgcgaagaaccttaccaggtcttgacatcctttgaccactctagagatagagctttcccttcggggacaaagtgacaggtggtgcatggttgtcgtcagctcgtgtcgtgagatgttgggttaagtcccgcaacgagcgcaacccttattactagttgccagcatttagttgggcactctagtgagactgccggtgacaaaccggaggaaggtggggacgacgtcaaatcatcatgccccttatgacctgggctacacacgtgctacaatggatggtacaacgagtcgcgagaccgcgaggtttagctaatctcttaaaaccattctcagttcggattgtaggctgcaactcgcctacatgaagccggaatcgctagtaatcgcggatcagcatgccgcggtgaatacgttcccgggccttgtacacaccgcccgtcacaccatgagagtttgtaacacccaaagccggtgaggtaaccttcgggagccagccgtctaaggtgggacagatgattagggtgaagtcgtaacaaggtagccgtaggagaacctgcggctggatcacctcctttctaaggaataatacggaaaaccttgtacatttgcgaagtcgaaactttgtttagttttgagaggtctactctcaaactttgttctttgaaaactggataataagtaatatattagttttaaaagccgagaaaacattgcgttttaaagagttttttaatagaaatatgaattagttcatatcgctaaactcaaataataaccctttaccgtaggtaaagttaggttaagttataaagggcgcacggtggatgccttggcactaggagccgatgaaggacggtactaacaccgatatgcttcggggagctgtaagtaagctttgatccggagatttccgaatgggggaacccaatacctttagtcgggtattatcattaagtgaatacatagcttaatgaaggtagacgcggggaactgaaacatctaagtacctgcaggaagagaaagaaaaatcgattccctaagtagcggcgagcgaacggggaagagcccaaaccaagaagcttgcttcttggggttgtaggacagaacattggagttaccaagttaagttgtaatcgaatcagctgggaagctgagtcaaagagtgtgataaccacgtagattaaacaacttaacctccgttctggatcctgagtacggcggaacacgtgaaattccgtcggaatccgggaggaccatctcccaaggctaaatactccctagtgaccgatagtgaaccagtaccgtgagggaaaggtgaaaagcaccccggaaggggagtgaaatagatcctgaaaccgtgtgcctacaattagtcaaagctcgttaatgagtgatggcgtgccttttgtagaatgaaccggcgagttacgtttatatgcgaggttaaagtgaaaagctggagccgtagcgaaagcgagtctgaaatgggcgagtgagtatatagatgtagacccgaaaccaagtgacctacccatgtccaggttgaaggtgtggtaaaacacactggaggaccgaacccacgtcagttgaaaatggcggggatgaggtgtgggtagcggtgaaattccaatcgaacttggagatagctggttctctccgaaatagctttagggctagcctcggaatattggatcatggaggtagagcactgtttggactaggggcccgtcatgggttactgaattcagataaactccgaataccattgatttagttccgggagtcagactgcgagtgataagatccgtagtcgaaagggaaacagcccagatcaccagttaaggtcccaaaatttatgttaagtggaaaaggatgtggcggtgcacagacaactaggatgttggctcagaagcagccaccatttaaagagtgcgtaatagctcactagtcgagtgccgctgcgccgaaaatgtaccggggctaaacataataccgaaactgtgggtggacacgtaagtgtccgcggtaggagagcgttctaagggcgatgaagctagatcgtaaggactagtggagcgcttagaagtgagaatgccggcatgagtagcgaaagatcagtgagaatctgatccaccgtatgactaaggtttcctggggaaggctcgtcctcccagggttagtcgggacctaaggcgaggccgaaaggcgtagtcgatggccaacaggttgagattcctgtactagtttattttgtttgaacgatggagggacgcaggaagctaaggaatgcacacgactggaaatgtgtgtctaagcaacaagtcttgagttgagtgaaatgcttgattctttaaggacaagttgtgatggggagcgaaattaagtagcgaagttcctgatgttacactgccaagaaaagcttctagtgagaaataaactacccgtaccgtaaaccgacacaggtggtcgaggagaatatcctaaggtgagcgagtgaactctcgttaaggaactcggcaaaatgaccccgtaacttcgggagaaggggtgctgaccgtcaggtcagccgcagtgaataggcccaaacaactgtttatcaaaaacacaggtctctgcaaaatcgaaagatgacgtataggggctgacgcctgcccggtgctggaaggttaagaggatgagttagcgtaagcgaagcccagaattgaagccccagtaaacggcggccgtaactataacggtcctaaggtagcgaaattccttgtcgggtaagttccgacccgcacgaaaggcgtaatgatttgggcactgtctcaacgagagactcggtgaaattataatacccgtgaagatgcgggttacccgcgacaggacggaaagaccccatggagctttactgtagcttgatattgagtgtttgtacagtttgtacaggataggtaggagccgtagaaatcggaacgctagtttcgatggaggcgttggtgggatactaccctaactgtatgaccactctaacccgcgccacttagcgtggcgggagacagtgtcaggtgggcagtttgactggggcggtcgcctcctaaagtgtaacggaggcgctcaaaggttctctcagaatggttggaaatcattcgtagagtgtaaaggtataagagagcttgactgtgagattgacaaatcgagcagggacgaaagtcggacttagtgatccggtggttccgtatggaagggccatcgctcaacggataaaagctaccctggggataacaggcttatctcccccaagagtccacatcgacggggaggtttggcacctcgatgtcggctcatcgcatcctggggctgtagtcggtcccaagggttgggctgttcgcccattaaagcggtacgcgagctgggttcagaacgtcgtgagacagttcggtccctatccgtcgcgggcgcaggaaatttgagaggagctgtccttagtacgagaggaccgggatggacatacctctggtgtaccagttgtgccgccaggcgcatcgctgggtagctatgtatggacgggataaacgctgaaagcatctaagtgtgaagcccccctcgagatgagatttcccattcctttatggaagtaagacccctgaaagatgatcaggtagataggctaggagtggaagtacagcgatgtatggagcggactagtactaatcggtcgaggacttaaccaaaggtgcaatgttaggcttttgaaatgaaatattacttattatgcagttttgagagaacgaagttcttctcagtgcgcaagcacaaaatagtgtggtggcgatagcaagaaggatacacctgttcccatgtcgaacacagaagttaagcttcttagcgccgatagtagttggtgggaaactacctgcgaggataggacgttgccgcgcaaatataaaaaggttgagccgaaaggttcaaccttttttgtagtaattaaataataagttgggagaaatcagcatgattcaaaccgtaacagaacagaacatcgcaagctttgttcaaacacaaccgttagtgattttagacttttgggcggattggtgtgcaccttgtcggattatgacaccgatgattactgaactacatgaacaattagctgatcagtttggcttaggaaccgttgatgtagaggatcaagcagcgttagctgaacaatatgcgattcaatccgttccaaccctattaatcttcaaaaatggtcaggcgacagaaaaggtaactggcgcttttccaaaagagaagttaaaaagatacttagataagaaaatcgctgaaatgtaatcagcgcattaatagtagcccgcaactttcattggagagttgcgggtcttttttgataagtagaaataaaataacccccttagctattgtctaagggggagatgattattgacgaaccatgtggataacacgttgataaaggattaatgcgccaatctcacaaagtaaaatcaaaacagctaatggaagataggtataactgcccatcacgccaactaatggggaaagaaaaatgccgaaaacatacatgccaagtccaagcactgaagaagcaatccctgcatgttgtccttggcgttgtaaggccagtgaggtgacaacggcattaattagaccaagtgttgcgaccactaggaataaaccaattaaagctaaccagagacgattagagccaaagccactaattaagacgcagatggcaccgattaaaccaccaattaagccgatttttaattgttgtaattcatcaaaccaatggattaaaatggtggacatttcagccattaagataatcccaatcccattgattccgtagattagactgaaagttgatttagaaagactaaagacattttgaagcatgaaactggaacctgaaatataacagaacattgccccataaacgaggccttgaattaaaacaaataggatgaatgggcgatctttaaaaatggcttgaataccaaggcgcgattgttgtgccgattgcgcgcttgtggatactgtgtgtgtttctttgaatcccaaaatgatgcctaacaatagaagaaggccaacaatccctaaaaagccgaaaatgccttcccaagaggtgaaacggagcaaagcacttcctattaatggtgaaatgatggggaagataccgttgattgccatgagtaaggcaatgaattttgtcaattgtttaccgtcaaataaatctttagcgactgctcgagtaatgacctgtcctgcagagctcgctaacccttgaataaaccgtaaaaggaagaatagccaaatattgtgggtgactaacgataatagacacgctgtaaaagcaagggcggttccgattacgagtggctttttacggccaacacgatcgctccaggcacccatgaagatggggccaatcgcaagtccagccaaacacatggttagactcagttgaatcatggaagcagatgaatgaaaatcagcttccataatcggaaatgctggtagatacatatccactagtaggggtccataagcactcagtgaaccaagtaaaacagataaccatagtgttcttttttttgttaaaaccatgttaataaaccctcctaaataaaaaagtgtaaaaaaatagcccgttgaaaacgtagctagcgccgaacgaatttaattaattactattcatgttgcttcttagttacactaacataagaagtcgggtttgtggcgatatatgagcaatttttaatatgtaaatggtttctatttcagtttaaacaagttatgatggagataatgaaaaaagttgtcgaatgaggttttgccatgaaaattgcccaaaaaaataaaatattagaaacctgcctaattgcgggacggattatgattgaaagtggttctgaaatgtaccgggttgaagatacaatgaaccggattgcttataatgcaggcattcaaaagagtgttgtgtttacgacaccgaccggtttatttatcggaattgaaaatcaaccttatgtgcaactaggcgctgttgcggtgcggacgattaaccttggaaaagttgaaaatgtgaatactgcttcacggcaatttgcgactaaggaaattacgttggatcagttaatgttacggttaaaacaaattgatcaggatacagctcattttccgttgtggttacaaattacagctgcagcagtcatttcagcgtttttgatgattattttttctggtgaatatgattggttagacatcataccgtcagcggtagccggtgctttaggctatgccgcctttgcggcggtcaatcgggtcacaacgattcgctttatcggtgaatttttaagtgcgacagtgattgggatagtcgcctatctattaactaggtggcacttaggagtcgatatcgataatattatcattggggctgtaatgccattggtacctggtgtagcgattaccaactcgattcgagatttgctagcagggcatttattatctggtatggcacgtgggatggaggccatcctgagtgcctttgcaattggaacggggattgcgctcgtatttagattctttatgtaaagagaggttcatcagatgccatattgggttcagtttattattcaagcgttatttagttatatttcaacggttgcgtttggaatttgtattaatttaccaagacgcgcattattatggtgtggctttgccggtatggcagggtggcaggtctattggatgctctttaactttggtagcgggcggatgcttgctaatttgttgggtgcgttagctgttgggatttgtggcaatattatggcccgttataagcggatgccggtgattatctttaatattccagggttagtgcccttagtgcccggcggaactgcgtatcgtgcgattcgaaacctcgtgctaggcaacttaaatgaagcttcgacacaaggtgttgcagtgatcatgattgctggtgcgattgccgttggctttatgttagcgcaaattttagccgatataacacgcaaacgagcgattacgccgaaatgggtatcgcgtcactaaaaagtatgctataataaggttatgcgatgagtcgagtaagtctcggtaggcaactattctgcgaaggcagctaggagacccaaagatacaggataccacggttattcatttaaccacttgccgtattgcaagggtgttttcgcccgctgtgttgtggagcacaaggtgtttattcttcggaatactgtgaaaaaagccccttccgtcaggaaggggctttttttgtgcgttcattttcttgcatgacagcgttactgatggtgcgatggtcgactaattcaccaatccgttttagatgtttgagatgtgcatcgtagtgttccgaaaaaacgagcgcgtataaaacatttaataggaagatgatggaggtattaatggtaaagttgccgattttcgagtagagtttttcgcgggttgtaatcggtaaaaagcaagtgcattcttgcgaaagtcgattttcaccgatactggtaatcgcaatcgtcgggatgttgcgggcgcgtaaaatagcgttaagtgctagtaagttgggattctcgccagaataggaaattaaaatcgcacaagcatccggactaagattataggcatcgtagttttcctcgccacgaaccgcagatagcgtaacgtttttttggatacgattcattttgagggcaaaatcttgcgcgatgagtaagtttgagttttgggagaagatttgaatatgatttgccttgaggagcaatgatttagcttgactcagatggtcgtggtcgagtaaaaagaagatatcatcaatcgtcattttgtccaagaccgccattttcttacaaatagtcatcaaactatccgtactcgaaaagggcagattgggatcgatacgcgtaaaatgtttattgaggtagcgccactcttctagatagtgtttcttaaaagatttccaaccgtcaaaatggagttttttggcaatgcggaccagagtggacggttgcgtataggtttgagcagcaatttcttggatggaaagctgatcgagtgcttctggagccgttaacaagtaatccacaaccacggtttcagcgggggaaaacgcgaatgtctctagtttttctttaattaacatgtaaccgcctccttttacaaaagattagcgatatttgtaaaataagtcaatcgataccctagtgatttgtaaattaaattcgcgtttaggccattaatatcggcagtttatgcgaactcacttttaaacgagggcatagaggtggggtttgcggtttgcgttaggtatgcttaatttgtaaacaaatcaaaggaggcattcagatgacacggaaagtaaaaattgcaacgattggtggcggtagtagttacacgccagaattgatggaagggtttattaagcgctatgcggaattaccaattggtgaaatctggttagtagatgttgaagcaggcgattgtcggaaaaatggcgcaacgaatgtgggatgcgtccccgtatgatgttcagattcatacgaccttgaatcgtgaagaagcgcttaaagacgccgattttgtgaccacgcaatttcgtgtcggccaactggatgcacgggtgaaggacgaacgcattccattttcatacagtctattggggcaagaaactaatggcgctggtgggatgtttaaagcatttcgaaccattcccgttattttagaaatcgttgcagatatgaagcgcctctgtcctgacgcatggttaattaattttactaacccaagtggcatggttaccgaggcagttttaagatacggtcaatgggaaaaggtgattgtttgtgtaatgtgccggtcgccgctaagatgggagaggctgaaacgttaggtgtgccacagacggatttaatctataaatttgcaggggttaatcactttcactggcataaagtagccgataaaaaaggtcatgatttaacgccgcaattgattgataaattatatgaagaaaatagcgggttaccgaaaaatatttttgatgttcctttctatcgggaacagttacagcaaatgaacatgatcccgtgtggctatcatcgttattactatcgtgctgaagaaatgttaaagcatggtttaacggaatatgcgactgaaggtacgcatgcgcagcaggtgaaagtcattgaatacgaattgttcgagttgtataaagaccctgatttagattacaaacctaaacaacttgaacaacgtgggggggcttattattcagatgcagcctgtgaaacgattgcgtcgatctatgcgaataagaatacagaaattgtggtttcaacgcgaaataacggggcagtccctgatttgccagcggattgtgcggttgaagtgacggcctatgttggtggggctggtgcgcggaatgttgcgtttggaccattgccaacagcagaacgtggttggttacagatgatgaaatcaatggaattgttaaccattgaagctgcgataacgggtgattatggcacagctttacaagcctttattagccatccattggtgccatccggtgaaaccgcaacgcgcgtcatgcatgaactactgattgcgcataaggcttacttacctcagtttgcagacactattgcacggttggaaaaagaaggcataacgattaaggatgaagtggttcgaaagatgtagtgatcatccaaaaaaggattggcgagcagcgaatcctttttttaatcccttaaaaggcgctataatctgtaaagattgatagaatggtagcaaggggtggttagtaaatgtttgaacttgaaaaaatccagcagttgaatacattggagctatcagttttaaagtatgttttaaatcatcgcgcacaggtcgaaaaaatgacgattcgtcagttggcgacccaaacgcatgtatcgacgtcaacaatctcgcggttttgtgagaagctagggtgcgaggggttttcggaattcaagtatatgctaaagcaagagcggttggcgcaaaaaaagacatcaatgcctgaatacgatgtcatgttgccaattaccgagtttttggataaaacgaataacgaaacgttcagacagcttttatcacaagcaacggcattaattttagaggcacaagctgtctttttctttgggatcggcactagtggtgcactggctcagtatggttcgcggtatcttgccaacgctggtattttctcgctgagcatcaatgatccatttacaccggtggggatgcgagaaacagtcgtggcggataccttattagtggtgctctcggtgtcgggggaaacaactgaaatgttggcacaagttgagcaatatcaagcaggaaaaggcaaagtattggcaattaccaacagtacgcattcgactttagcgcggttagcggacgttgtgattccgtattatatgcctgaagaaaagaatggttccttgaataatacaacgcagataccggtggtttatattctagagttgctagcacatcgggttgcttgcgctcagtaagtgttgtttgaaacatgttttttttaagaaacaaataccaatcagtggtgcatgtgtttatcaccgttaaaggactagtcgcccagatggcaacgcgctatactgcaattatggaagcgcattctgaagtggcgatgttgatcaatcgccgtgattaaatagcgaagggaagttaaacacatgaatacttggattaatactaaattaatgccacctattatgaagtttgttgcgacgcggccgattacagcgttgaaaaatgggatgctatacgtgatgccatttacaatcgttggatcgattttcttaattttagccaacttgcctgttaagagttgggccgattggatggtttcaactggtttgaccccatattggaacgttgcctataacgcatcgtttgcaattatggcgttaatcgccgttgcggggattgcttattcttgggttcaggatgaaggttttgatccgttcccagcctcattacttgctattgtttgtttcttattagtgacgcgcccaagcactgccattgtttcggcatccggtaagattgttgtctctgttaaaatgatgagtcaacaaaccgggtttattgatcggacttggcttggtggacaagggatgattactgccattattgtcggtttattagtcggttggatttactcagctttcttaaaacatgatattcggattaaattaccagaacaagtgcctgcgaacgttgcaggttcctttaccgctttgattccagctgctgttttaattagtggctcactcttggtttatatcttcttcgacaaggttgcaaactcaaccttaacagaatcaatttacaatgccattcaagcaccacttcaaggaattaccgattcatttggtggcatgttagccatttctttcttagtaccattcttgtggttcttcggggtgcatggttcaacaattgttggtgggattatggggcctttactgcaagccaactcactggctaaccaaaaaatcttggattcaggcaaagcattaacgttagctaacggtggtcacattgtgacgcaacaattacttgatcaatttatgacagttaccggtgctgggatgacaattgggattgttgtttacatggcattctttgccaaatcagcacaattcaaagatttagggaaattatcattagcaccagcggtctttaatatcaatgaaccgattttgttcgccacaccaatcgtgatgaacccgattatgatggtcccattcttcgtgacaccaatgctatcagcaatcttaacgtggactgcgattcgggtcggtttaatcccaatgttccccggaacgttggtaccatggacgacaccaccaatcatttctggtttattagtcggtgggtggaagaccgcattgtggcaagccttaatgttattaatgacgttctttacgtacttaccatttattcggaaacaagatcacttgaactatgcttcagaacaaggtgcaacaactaaatagggggaaaggtcaacatgggacaacttagaaaagattttttatggggcggcgcagtggctgctcatcaattggaaggcgcttggcaagcggatggcaaagggattagtgtggccgatgtgatgactgccggggatgttaatcatcaacgagggattacagatggtgtacaaccggggcacaattatccgaaccacgaaggcattgatttctatcatcgttatccagaagatattaagttatttgccgaaatggggttcaagagctttagaacatccattgcatggacgcggatttttcccaatggggatgaggcacaacccaacgaagccggccttaaattctatgatgacctatttgacgaatgtctcaaatatcatattcaaccagttgtaacgctctcgcattttgaaatgccatatcacttggtcacggaatacggtggttggcgtaatcgcaaagtcatcgactttttcttgaactttgctgaaacggtcttcaaacggtatcgtaataaagtgaagtactggatgacgttcaatgaaattaataatcaagctaattaccacagccagtttgccttatttacaaattctgggttacagattcaacctggtgaagatgctgaaaaagtgatgtatcaagtcgcccactacgaattagtcgcgagtgcaaaagctgtacaaattggcaagcaaatcaatcctgatttcgaaatcggctgtatgattgcgatgtgtcccatctatccactgacagctaaaccagaggatgtgctcaaggcagaacgcgcgatgcaaacccgttattggtttgctgacgtacattgtcatgggcgctatccagaatggctcttacaatatcaaaagaaccaacactacgatttagacattaccgcagatgatttgaaagaattggctgcagggacagttgattacatcggcttcagttactacatgtcatttgcaactaaggacaaaggtgaaacaacgcttcattatgatgaagaacacgatttagtacctaatccatatgtcaaggcatcggaatggggctggcaagttgatccagttggcctacgttatgtaatgaattggttcaatgatcactatcacttaccagaatttatcgtggaaaatggttttggtgctgttgatcacgttgaagcagacggccaaattcacgatccttatcggattgattatttacgcgaccacattgttcagatgaaaaaagccgtggaagatgacggtgttgatctgatgggttacacgccttggggctgtatcgatttagtttcagcaggcaccggacaaatgtcgaagcggtatgggtttatctacgttgataaaaatgacgacggaacggggacgttagctcgttctaagaaggactctttctattggttccaaaaggtaatcgccaccaatggggatgacctagcataatcatgaatagcgacgcaggcaaattgattttgtctgcgcctttttttgttgaaagaagcccatgcattattaataacccatttttctgaaataaaactgttattttatcgtgagttaacactaggcaattaccattatgaaataaattatgagaattagggcttatctaatgcaaaaataatcactatcgtttacaataagtaagtattaaaaatggaatggggtaaagaaatgacaattacatatgtcgtcatcaacatcgtgatcatgctcatcatgttatttgttttaaacaagatggcccggattcacgttaagtttagtcgccgcgttttcacggcattgggggtcgggattttattcggcgcactcttacagattatcttcaaagcagattcaacggttgtcaaacaaacagctgattgggtcggcattgtcggcaacggttatgtctcgttcttaaagatgatcgttatgccgttagtcatggtttcgattattcaagccattacgaacttggaatcatctaaaagcttagggaagatggccggcatggtcattggaatcttagtctttacaaccttaatcgcagccacagttggttcagtgacagcggatgttttcggcttaaatgcgagtgatattcaatcaggccaagtcgaaaaggcccgctcgaaagaattacaaacgaagctaggcgatgtacaggaacaaactgttcctgaaaaaatcgttagcttcattcctgaaaatccattcatggatatgacgggttcacgacctacatcaacattagctgttgtgattttctcagctttcttaggagtggcagcattacaattacggcgtaaaaagccggaacaagcagaaatgtttaataaaatcgttaacgccttgtacacggttatcatgcgcatggtaactttaattttacggatgacaccttatggggtgttagccttaatgacaacgaccgtagcacaaactaatgttaaaggaattctcagtctaggtgagttcgtgattgcctcttacgtggcattaatcatcatgttcttgattcacttcctattaattacgttcacggggttaaatccaatcaactacattaaaaaagtgattccaacgttaatctttgcgttcacgtcacggacgagtgcgggttcaattccaatgaacattgaaacccaaacgaaacgtttaggggttgaagatgggattgctaatttatcggcttcatttggggcttcaatcggtcaaaacggctgtgcgggtgtttatccagcaatgttagctgtgatgattgcaccaactgttgggattaatccttggagcatcggtttcttggttaaattaatcttgattgtggcaatcagttcctttggggttgctggtgtcggtggtggcgcaacatttgccgctttaatcgtactttcttcaatgaacttaccagtcgggttagccggactattaatctcagttgaaccattaatcgatatgggtcggacagccttgaacgttgatggctcaatgactgctggggtcttaacggctcacttattaggtaaattggataagaacaagtttaatgatatgagtttgacggaagattcagacgaaatggcttaatttcaaaaaatggagggtttagtgatgcgaacgattattatcggtgccacagctgccggaacaagtgcagctgcaaaagcaaaaagaacgaatccagatttagacattacgttatacgaaaaacgggactatgtgtcctttggggcttgtggcttaccttattttgttggcgagcactttgaagatcccaaccaaatgattgcccggacacctgaaaaatttgctcaacaaggtattgatattgcgcttgaacacgaagtactatcagttgactttgatgcgcaaacaatcgtggttcgggatttgaaaaccaatcaagatcgcacagaatcttatgatcaattaatgttagcaacgggagccacagctgtgatgccaccgattaaaaatgttgatctcaaaaacgtctatcatctacggacgatggcagatggacaagccttacgtgaattaggacaagacccaaaggttcaatctgtaacggtgattggtgcgggctttatcgggttagaaattgccgaagagttccatcaattagggaagcaagtccgggtcattcaactagaagaccgaattttaccactggcttttgatccagaactaacggacatgttcgcggatgacttacgtgataacggcattgaattacacttatcagaagctgttcaagccttagaaggaactgttcaggtgactggcattgtgactgataaggggcagtatgcgacagacttagtgattgtagcagctgggattcggcctaatacgcaattcatcacggatgatcgattgaagaagttgccaaatggtgcgattattgtcgatcaagcagggcggacatcgattgaaaatgtctatgccgctggcgataatgcaacggtcattaacagcgtgacgaaccaaccgatgtattcagcacttgccactggtgccaataaattaggccgaattgtcggcacgaatttaggcgggcaagccgctcaattaccagggatgttgaattcagctggtgtgaaattaatcacgctagaagcgggccgcacaggtttgactgaaaaagaagcgacagaggctggtattgatttcagtactgttttaatccacgacaagaaccaaacgaattattatccaggccaatcagatttaacgattaaattgatttacaccaaagcagagcataccttaattggtggccaggtggttggtcaaaaagacgcagtgttgcgcgttgatgtgctcgcaactgcgatccaagcgaagatgacaactgaacaacttgggttacttgaccttgtttatgcaccaccgtttgcaagaacgtgggatgcactgaatgtggccggcaatgttgcccattaatttaaaaaaagtgacaccgcacaaaccgtgtagtggcgctttttttgttgcatgcttaaacagttgttcatagtgtttacttgaatgtttactcgggtctgtgctaaaattgcatttagaaattaaatttttgcaaagttagttatgaattaattacgatgattaagaaaacacaaataaaaaatttatcgacaggagacagtttaatgaacaacacaaagagtttgattgcattgagttctggaattttaggggcagctgggatcggtttattgagtgcagggcaagtacaagcagcaacgacagcaaccgtcaactacgcagatggtgcaacaactgtttggacaagtccaacaactggtcaaactgctaaacgatacatctttaagggccaatcagtaaatcttttagcatcacaaaagattggcgctgaaacatggtaccgaattggaaacggcgaatgggtacctgaacgttacttaacaaccagtgacgctacaccagctgaaacaacaccagcaacagaagcacctgctgctcaaaagacagctcggattgcctatgccggtggcgcaacaactgtttggtcaacagcaacttatacagccccaacaggccaatacttaggttatggtcaaaccgtcaacgttgtgaaaacagaaactgtttctggcgaagaatggagtcaacttgaaaatggcggctgggtaccagctcgctttataggtgatggtaagattgaagccacaccagcgcccgttgcacaaccggtagcaccagcacaacctgcaacaacgactcctgttgaaacaccagctgcgccagcaccagttgcaacaacacccgcgcaaacagaaagcacgcctacaacaccagcgcctgtcgcagaaagtgaatcaacaccagttgaaacgcctgccacacaagaaagtacaccagctgtagcagaaagtagtgcgcctgctcaagcagaaagtacaactcaaacacaacaaccagctactcaagaatcatcagctcctgtccaagaaactgcaccagttgtaataacaccagccccaactcaaaaggcaccagttgtaacgacaccaacaccagccccaacggcacctgcagcaacgactggtaatgcgcaagctgttattaatttagcgatggctcaaattggtaaaccttacgtttggggtgcccatggtccaagtagttttgactgttctggattaatggactatgtcttcagaaatgctgctggtaagagtatcggtggttggacagtccctcaagaaagtgccggttatgctgtttcattaagcaacttgcaacctggcgatttattattctggggttcacaaggtagctcataccacgttgcgctatacattggtggcggacaatatatccatgccccacaacctggcgaaaacgttaggatcggttcaatgcaatactatgcaccaagttttgcacgccgtgtcttttaatgattgcaattaagcgaacatctcacctaggtgggatgttttttgtattttagccctaaataagctatgatatgtagagatttaaaaaaggactgacgagatgaagatagaagtacaagcatttatcaatcaaattcaagatcaaacatatttaacggatgaatacgagctccccacgccagatccttttgtggcggacggtattttggcacagttaaaacccgctattgataaagccattgaaaaacaagctttggcctctttttcggtgctgacagaatatgctggcgaacccgttaaggtgacattggaaacggggattgtgaatctaccattacaatacattaaaaaagtaaatcaattttttgaactcgacgaccaagcagaggtgaatctttatttatacgtgacatcgccactcattaatcgctcgaacatgcggattgacttaattggaacggtagcttcgtttgaagaagcggcagctgctaattggacgaagattgccgacttgctaacaaaggacttggaagccgtcgtaatcggttcacaggcgcctaaagaagaaccaatcgaaaagaaggcgcccgctaagaagaaagccgcacctaagaaaaaggcaacgactaagaaaaaagcgcctgccaagaagacaacagctaaaaagacagctaccaaaaaaacaacgactaagaaaacaaccaccaaaaaaaagactacgaaaaaagcagactaatttagtctgcttttttgatggcgtctattaaaggcaagtcgccgttaacaaacgagaatttcttgtggattgtttcggtcggatgttctaagacggtgcaaatcatcgcagcgacatcagcacgtgcaacttgtccaccagatggttgcattgtcactaggccggtagcttcgtcgtttgtaagtgtcccaggacgcaagatggtccaatctaaaccagagaattcaagccagtgatcggcatagtattttgcagcgtagtacggtttaatactttcaggccatttagttcgatcctcaacaaaaagtgcactgaccatgacgtagcgactaacttcagcaatcttagctgctgccatactcttaacggcgccatcgagatcaaccaacagtgtttgatcatcgcctgttttaccgccagaaccagctgtaaagacaatcgcatcatgatcggcaaatagtggtgctaaagccttaggttgtttggttaaatcgaataagacaggcgtggcccctagttgtgcaagttcatccgcctgttgttcgacacgaatgccggctgtaacggtgtgaccggcagcaacgagttggctaattaggagctggccaacgttaccatgggcgccaataacaaaaatccgcatagtaaaacctccaatataaatgtgtgtgctgtccattatagtagttattgaacagtgacgcaaagatagtggatttaaaaacctgtgttgtagtacaataaaattcggcaccttgcgaaaaaatgagtgtgctttagggtatataatcttgaaagtggctgatggcaacctttaaataggcaaagctaattgtgggattcgttttagaaataaatctaagaatcctctcattttttcacaaagttgcttattagaatatcatgaagccgtgtttgttttgtgttatggtacagatatagagattgtgatttattggataagtagtcctatttgttaatgctatctcagaaagtaggaggagaacatgacaaatcaatatcggagcgtttttgatatcattggaccgattatgattggtccttcaagttcacatactgctggcgcagttgccattggacatgttgctaatcgtctttttcatgcaccgattaacaaagttattgtgcgttactacgaatcttttgcacaaacccaccaagggcacggtaccgattatgcaattattagtggcgtgctaggattcgatccggctgatcaaagggtaccaatggcagttgatttagcgcgacgtcaaggtattgacgttgtcttcattgaagatccagggaatagtccagtgcaccatcccaatacagcggaattaacgttaatcaatcgtgagaaggaactaacgatttggggctgttcaattgggggcgggaccatcgaaatccgccaagtgaatttgaatggcattgtgattaaaacggatggcccgttaccattggtttttgtcgaatcggaacaagaaatcggcgatgctttagaccagatatttgaaggcaactatcgtgataagcgcatatcggttaaagtgccagatcggtttttgtataaaatcgaactgattgataagccgtacccggaacagattgaacaggtccgcggaatgagccaagacgttattgtgttatagaaagtggtgggaagatgtatacaacaattcacgaattagtcgagacagcgcaagaacggcaactaccaatctcggaattgattatcgaacaagaggttgcgatgagtcacactagtcgtgaagtcatttgggcaaccatggggaaaaacttggatgtcatgattgcggccgaagaaaaaggcgtgaccggtgaaggtgttcagtctgccactgggattacaggcggtgaagcggttctgttgaagcggtatcgggaaaagggaaagtcgttatcaggtgatgtgatgttgaccgctatgcaaaatgcggtagctaccaatgaagtcaatgcttcaatgggaatcatttgtgcgacgccaactgctggttcagcaggtactttacctggtgttttgtctgttattactgagcgcttggcgcttgatcgggatgcgcagattcggttcttgttttgtgcgtcagcctttgggatgattgttgccaataaggcgatgattgccggggcaactggaggctgccaagccgaagtggggagtgctgccgcgatgggcgccgccgctgcagttgaagctgctggtggcacaccacaacaatcgtcggaagcattcgcgatggcgatgtctaatctattgggattggtttgtgatcccgttgctggattagttgagataccatgtgttaaacgaaacgtgattggggccgtcgatgccttgaccagtgctgatatggcattggcagggctaatcagcaagattccagctgatgaagtgattggtgccatgaaacgaatcggtgaagatatgccatctacattacgtgaaactggtttaggtggattagctgctacaccaaccggggttgcattgaagatgcaaatctttggtaaggataagagccttaaataaaagcgacttttaggaggaacaattatgcaaaagaaactttcaaaatccgcatacggcggtgtttcaggtgagaaatatgtaccgtatgtcaaccaaggcgacaaaaaggtcggcaacttagcgattctaataatggggagcattttagccattatttttgctgcttcaacagcttattctgggatgaaggccggtttaaccgttgcagccgggattccaggttcaattattgggtctgggttagtcggcgcctttgccaaatcaaaagggattttaggcaagaatattatgcaagggatgtccagtggtggtgaatcaatcgccagtgggatgatttatgttttaccagctattattttaattggtggccacatcaacttcattcaagggatcatcgttggggtgctcgcaattcttttttcaatggggacagcctcattagtgcacaactacttaatggttgaagaacatggtaagttggtttatccagaagccatggcgatttcagaaaccttagttgcgtcagatactggtggcgattcgcttaaatacatgggcgttggctttggtatcggtggggttattacgatgctaacttcatcagtgtttggtgtcgtcaacaacatgattagctacgttggttcatcattttataaatggaaattggacgttgaagtgaatccattacttgcaggaattggttttatcgttggattagaagtgtcattaacaatgtttgcgggtgcgattttatccaactttgcgattgcaccgttaatcggttatttcacagatatggcgggcaacagtgcgcatgtttggaataacacgagtttagccgtgaatcaaatggccgttaacgatttatcaagttcatacgttaaatacattggtgccggaatgatgctttgtggtggtttaatcggtgcgattaaattaatcccaactatcgtgacatcaatcaagaaaacactagctgccaaaaacgtagcaggcgaagaaaagaatacgcttggtatgattgccattgttgttggtggtgttgggatcttcgttattggtattatcattgcgcaaaacttcttaatggggattgttggtgcattactagcagccatcttaagtttactctttgtcattgtttcagcccgggttgctgggacgattggttgttctaacttgcctgtatcagggatgacaattgcgtcattagtgattatgacggtagtcttcgtattatttggttggacggacaataaccatacgcaaatcttattgatgttcgggacattcgttgtgaccgccgttgctgttggtggtggctacatgcaatctcaaaaagtaacatatgtcattggtggttcaaaatctgaaatgatgaaatatttcatgattgccgggattgtcggcgtaatcgtaactgtcggcacaatcagcatcttatcaccacaattcgttacagatagtgcaacaccagcctttgggttaccacaagcgaacttaattgctacattaacatctgggattatgacgggtaaattaccatggatcatgattatcgttggggttatgatggcattagctttctactttttagatttaccaatcatgaccgttgcaattggtttttacttaccaatttcaaccacttcaatcatcttgatcggtgctttgattaaagtctttattgaaaaagcaacgcgtgatgaagcgattaagaataatcgggttcaaagtgggattagtttatcatccggtttaattgctggtggttcaattattggtttaatcgggattattctccacgtaaccggtgtgttaaaagatcgcgtgattactggttttgcgaataccaatgcaatggggattatcttattggttgtcatggttgtttcgattactgtgccacttatgatgattcataaaggaggggcaacagaagatgggacgacagaaagcggagattgatttagaacaactcatctatgaaaaaaatccgcaagttcagtttaagttacaagctggccaggtcaccattattcggccgcagaatcactggattcaacggacattacggcgtttgcatgtgaagattccgctagaaacacagctggaacttgatgattatggtagttttgtctttaggcatgtgaatggaaaacgcagtgtccaccagattggccaagcactggcaggacagtatgatgaagccggtgaatacctgtatgaacgattactcgtgtatttgaatcatctagaacacacagaacatttgatccggcgggtaaccgactaagttttattaatcaattagtgaatcacatttttaataaaaaggagtttttcaaatgacagacagaatcgaattatcagcatgtacttcaatgatggtagggaagaatgcgtcaattgatggctctacgatgatttcgcgaaatgaggatcgcttctatgcaatccatcctaaacggttcttcgtacaaccagcagttcatgatcgacatgagacatatgtttcaaaatataacggcttaaccatgccgttaccgacggacggttatcgttacacatcaacccccaacggcgatttaagtgatggtttaaatgaagaagacgggattaatgaaaaaaatgtcgccctctccgcaactgaaagtgtttatgccaacgaacgggtattagcttatgatccgttggtcaagcaaggtttagctgaagattcaatgtgtacgttggttctgccatacatcgattctgcacgtcaaggggttcaattgatgggggatttgattgctaaatacggttcagctgaaggcaatggcgttcaatacagtgatcaaaatgaagtttggtatcaagaaattgttactgggcatcactgggttgctgttcggattccggatgattgttatgcagttgccgctaaccaaattgccatcgaagatgtcgactttaatgatccagaaaattacatgtggtcagaaggtattcaagaattcgtcagtgaaaatcacttgaatccgagtgaagctgaatggaacttccgtaagatttttgggacggatactgaattagatcgtcactataacacaccacgggtttggtatgcacaacgctatttgaaccctgaaatcaaacaagaacctgaatcgagtgacttgcctttcattcgcaaggctaaccgtaaaataagtgtggaggatgttcaatatgtgttaaaatcacattataacgaaactatttacgatccacttggtaatgggacagaagaacaaaagacgatttatcggtcaatttcactttcacggacgcaaaactcacatatctgtcagattagaaacaatgtgccagatgctgtgcgtggtgttcaatggttaggtttgggggtaccaacattctgtccacacgtaccattctttacgaatgcgatggatacggatgaaagttatcgcgaactaccagctaagatgcagttgaagaacgcttactggttatatgaagcattagcaatgattgttgaatcacactacggggcctttaagaaagctgatattgactaccaaaaagcattatcagaatgggcaagaactaagattgctacggtggatgctgctgtaaaggcggaagcgaatgccactgatttcttaacccagcaaaatcatgaaattgctgcacattaccatgaagcaacaaccgatttgttagcgcaattggtgacagaaggaacgcaactttctaagttgaccttcgtcatggataagaacctatagccaagtgcgcactttaatcatttgtcacactcttccaaggggggagtgtggcttttttaatcgatggaggtgctacagtgattgctttaaaaggaaattcgaaaaaaattattatcgcgatggtatacggttttttggcggcggtgagtgttaatctgttcttgattccggcgaagacgtattcgagtggggtcacggggattgcccaattactaacctcgttagtcagctatatgggcggctcattaagtgttgcgatgttggtctttattttgaatgtgccattattgattctggcatggttcaagattaatcatcagtacgcgatttttagtatcgtcgctgtttttacgagtgtccttttcttgaaggtcattccagtacctgttcacccaattgtcaccgaacgatttgcaggtgccttgttcgggggtgcattgattggtttaggggttggcttgtgttttaaagcgggtttttcaactggtggcacggacgtcattgtgacgttagttgggcgcttaactggcaaacgggttggtgttgtgaataatatcatcaacggaatgatcattcttgcagcgggcatcttctttggttggggtgctgccttatacagtatcgtcgaaatttttgtttcaagcttgttgatggattatatctatattcaacaacaaaaggtgactgtgacgatttttaccaagcgacctgaagaattgaagaagcgaatgcgtgactttattcatggtgcgactgaattagatggaactggtctgtataccaaccaagaaacaacagtgatcatgacagttgtttcaaaatacgatctaacggaattaaaacgggtcgttaaggatgccgatccgaatgcctttgttaatattcaatccacaatgaacttgtggggtaaatttgaaaacgtcgaataatagtagctatcctctggaactaaaaaacggtcctttcaacaacgctaagttgtgaaaggaccgttttttttatgtggtttggcggagttgaccgtcttcgatacgccaaacgtgatcgacgagatctaaaacccgttcgtcatgtgttaccatgacagctgcgcgtttttgttcatgaactgcatcgcgaattaagtggacaatttcacgaccacgttgcgcatctaaactggcggttggttcgtctgctaaaatgagtgcaggttgattgataagtgcccgagcaatggcaacccgctgcttttcaccaccagaaagcatagcgggataactatgtaatcgatggcctaatccaagttgtgtcagtaattgttcagcggcggattgatcgcgacgacgggcgattttttgtaaaaaagtcagctgctgagtgaccgttagatagggaattaattctgaactctgaaaaataaaaccaattgattcgcggcggatttgtgtttgacgattacgattgagtgttgcaagttcttgaccggccaaggtaacacgaccggctgtgggttgcaagagcgcgcccataatcgtcaacaaagtacttttaccaacaccgctgggaccaacgatggcgctaaattcacctggctgaatcgtgaaggagatatcttttaaaatgtgattaatttgatcaccatcgggataatctttggtgatgtgttcgagtgttaaaatcggtgctgacatattaatgacctccaatagctgtgatcgggtcaatccgaatcacttgaataagggataatagggcgcttaggatggcgacggctaaaaatagaacgctggtgccgatgatcgttggtgctgtgagcataaacggcatgctggcaggcattgactgggcgatgacactaatgataccgccagccaaaagaatcgccactgccgttaacaagccaatctcagagatgatgtgctggctgagatagcgtgtggttgtgcccaatgcttttaaggccccaaagtcccgtaatttctgtagggtaatgatataaaagaaaattgcgaggacaaacagtgagatgacgtataaaaagccgatcatcaagtacaatgaactttgttctgcagagtagccagggatgttatcaatcaaggtttgtttgctgatcacttggtagtgcttgttaaccgacaagggccgtttgctagcaaacgcgttataggtcgtcttttgcgttggaaaaatggtttgccactggtggtggtttaaataaataacaggcgtatgggcataagccatctgcttgctaaagccgccgattttaaattgctgaccagtggtactgtctttaaaggtgtcgcctaattggtaaccattggcttgtaacttgctgctgaccaccactttttgggtggcttggttggacagcttttgaccttgggtgactttgggtgtcatgaagctcgtagcgtcaactgcaatgtaggcaatgtcagtttttgtttgttttttaggccgctcgatggtggcttgggtgacgttgatgggtgtcagtgattggtgtttgagagcttgccaatcagattgggtgagtgccgagcgactcaaccgactttccgaaccggcttgtaaaacaaaatgcgtcgccggcgtatttttaatagccgcgccactatcgtttgctaaaccggcagctagtccggtgatgaagagtactaggaaaacgattaaaaagatgataaaactcagtgcgccaaattttaacttattatggcgtaattcttggattgttagaaacatatgccgacctccgatgacttgttattaaggctactataacgatggttagttgattcaacaataatcaatctaagtgtttctgtgttataatgcacacaagttagtcaattgtgatgtaaatggaggctgaaagatggttaatctgcaagacagacgggttaaacggacacataagttaattcgcacaagttttattgagctcctactaaaacacccaattaatgagattacaattcagatgattgccgaccgggctgatattaatcggcggacgttttatttgcattatacggatatctacgatcttttaagccagacagaagattttaccttaaatgagttcagccagttgctagaacgttttgagttgccttctgaaccacagattgttggccaaactttctttagatgggtcttgtcatatgtgcaagacaacgagtctatgttacgggtattgtgtcgtaatcccgattcacagttaatgaataaattagttgcgttgaccgtgactcacggcaagcgggtgattccatttcagcagccggaaaacgctgattatattttgaattattgttgttggggtctaatcggtgttttgcacactgcattgtttaaaccagcgtttgacgcccagcaattggcgctcgttgctgaacagttattgaatgcttctttacaagccagcgaaattaaagcatagaaaaaagcccaccggtgcactaggccctgtcaagttgacaaatgaaataatataaagttgaatctgtctctatgcggcttcactccagtattcatctggggtgaggccgtttctttgtgctgagcggttgtggtgattgaaatattcgattccttcctcaaccagtcttacaagctcttcgcaagtctttgctagtggatggcgagccatccaccgtaacttgaattcgttccaccagcgctccatcggtgcgttgtcgtatggtgttcctggtcgagacatactacgtgtgacgttgtaacgaccaagaaagttgttgaaggcaccagaggtgtaggctgatcctcgatcagtgtgaaccaatgggtggacgtcgccagaagcctcaaaggctcgttggaaaacctcgatttctgctgctgacgtttcagtagtgctcaaattgtaggacaataaacgtcggccgtagagatcaaggacgccactcaagcgcaccttatacttattatttacgccgtaagtcagttccgttgaatcggacaaccagacctgattaggactgtcgacgtcgaagttctgattgagcacattgtcttgaatgtgctgttcgttctccttatgtcgactgtgcttcttgacccgaatttgacatgtcaagctgagctcccgcatcacacgacgtaccatcctgaaagtaacggggaagtcaattaggtcatcatgttgaagattcaataaaaggttcccagcaccgataccttgatgatgaaaatcaaaccagtattgtgtccgttccttgagctgacgattacgggcttcccaagctgtttcttctcgatttaaccctttgtagtaagcctgccggcttacaccgacaacggccaacagcgtagatattgcaccacgcttgccttgactgacctcattaattgcgaagtaagacagtcgatgttgtttactcaccccctgcgctggatttccagcaatttttttgcgaatgcctccacaagctctttgtctgcgagctgtgctttgagctgcctgatttcaagattggctttatcgagttcagtcagctcagcttgttctttgtgatggccacggttgtccacgagcgcctcatagccgccgtgattggccttgattacccatgaacgtgcttgttgataagagacttggaagcgttcagcggcctctgtgtatgaatgattcagcttggtgacatactcgacaatttcaatgcgttcttccaaggttgttttacggctcatagtgggaacctgctttctggacggcgacgccgtcaaaggtttattcccattatacttgtttacccagtctacgacttgctgcgatccacgaagtccaaacttatttgcaagttcatcaaaggtgccttcgcctataagatatgcgtggactactttgagcttgagtttcttcgaatagtgtttgtttttcttagcctcctttagaccattaattccatcacgggagtatcgatctcgccaacgctctagcgtcttatgattaatgccatggcgattggccaccggacccagtccaatttttgattgggtcagttcatctaagattgttaatttctcgagtaccgtatgtttagatctgggcatacaaaaatccctccatagtcgtcagatgaattattgtatttcatctgacaaccataaagggattatcgcacggtaaataaatgtcggtgggcttttttctattttattttgctttagcagcttttaattgcttgaggttaacaacgatcttgttgtttaattccgaaacgttggccttgtcggctgcatcgaaatccgtaatgctaattaaagcggagttttcatatactttttcaacagttcctgtaaatgcaccatctaggtcttcgttcactttgccggttactaaatcaccgatattgagattttctttatccatagccaaaaactccttcagacattattaaaattaccaaataaggtgataataaactatgtcatggtaaatagcaagacttactgctataaattaatcgtttgattgtgaatgaaacgaaattggctatttaattccccatctaaatacgctaaaaagaaggagtgttaccggttacaaatcaaaattgaggggaattcatatggaaccttacttagttttttcagatattgatggaacgttggtccttgactatcaaatcgtgacacctttgaccaaacgcgtgattcgaacattacaaaaacgcgatgtgattttctatattgccaccggccgaatgtacaatcttggccgggtaatttcgcggcaaattaacgatgatgtccggattgtggcttctaacggtgctgtctttgaaaatggccatcagatgaacaagcattatttaggtaaaaaagcgctcaaagctgcttacgaagcatgtttagcagatcccaatttatctgcgcacttttttaccactgacacagcttactatacccaagaaatccccaagtttgttgcgcgcgatgcggggaatttattgttgaatgccgatattgataatcaaccggtgactgatttagaaatgttgttgaatttaagtgatcagattactaacgggattatcattggtcgcggtcatccagagagtttagcagccgctaaacaacgattaatggatcaagctgtgatgagcttgtcttcttctggtccagacaacatcgagatgattccaaccgggattgataaagccactgcaattcgccagattcaaatgattcatggcattgatgccgatcatacaattgtctttggggatgggcaaaatgatttgggaatgttgcaatcagcgaagtacagtgttgcgatggacaatgccttaccagaggtcaaagcggctgcaaattatgtaacagaaacgaatacgaatgacggggtcgctaaattcttacaacaacattttgaattagcactttctgatacagaagttggtctctaggggcttgacccgctttttatttttcgatatacttatatcacggttgttaatcaaccgtgaaatgctgttttagctcagtaggtagagcatcaccatggtaaggtgggggtcgtcggttcaaatccgataaacagcttaaaaaaagagtgtgactcgaactgggtaggctttgaggattaacagggaaaagggcattatggcgggacttgccataatgccctttttgcagttaaccggagaagactgttcgaggagcacgttaaaaaatgagtgcattcaagcttggtcaacttttgagcattaagtcgagaataaaaggcggacaacatttctaacatgttgtccgtcttttttaggcttttctggttaataaacgttcagttaattgttgtagcattgtttttgcgggcatgtcgggtagtttcgcaagaccagcgagtgcgcggtttgtgtaatcttgtgcgagtgcttgggctttttcgacacttccagattgacggacgatgccttgaacagcgtgcacatcggcatcagtcatagctgcttgtttttccaagtagggtgctaatgtttggcgattggattgcagtgccatgattaacggaatcgagtagacgccgcgtcgcatgtcatcgagaactggtttgccaaaatcgacatcggtctgagtgtaatctaagatatcgtccagaatttggaaggcgagaccgatatttaagccgattttctcggcttggcgggcaaacttcaagcctttttggctttcgtaagcaccgatgaagcaactgagcgcgaacagttggccggttttaccgttaatttgttgtaggtactgttcgggggttaaatcgagattatatcgggttgtcatctgactgagttcaccgtcaagaatttgatccatcgtttggctgttaaattggatgctcttcaaatcgctcgcataattggctagtaacttgaagcagacaacgaataagtaatcgccagcgtaaacggcgacatcttttccgaaacgggcttgaatcgattcttgatggcgacgtaaattggaatcatcaacgatgtcgtcatgaattaatgtcgcagtgtgtagcgtttcaacagcggcggctaatgcgatcatcttctgtcgatcgactgcattaaactgtgaaaataataagcagtaagcagggcggagcaacttgccgccagcactaatcatctttaaaatggcgtcggtgacggcttgatttttggtgtgaatgttgtcttcaatgagcgcaagactttgcgcaagttcggtttcgatttctggatagttctgccacatggcatgtactttcgccataattaactccttgttaaattaaatttcgtgttgggcttttaaaaaagtcagggttttgacatgttcgaataaaaaattcgcggctacgccgaccgcaattccggcgagaataccgagaaaagcaagcactggtagatagaggaggacttgccaactctgggcaatgaaactcgcgacgcagagttgaccgacattaaagagcagaccaccagcagctgagatgccaatcatactcataaagcgacggctaaattgcttgaggagtaccatgccaaagaaacttagcgttgccccagcaatgctatacataaaagtagagagggttccccctagcaaggcggataaaacagttcgcatcaccatcaataaaaagcagtcgctgaccggtagggtaaataacgaaatgatggtaattaaattggctagtcccaacttagcacccggggctacggcaaatggaaatggaatcgcgcgttcgacaaggccaataataatcccttgagcgcacaagagtgcaatatagatgtatttacgcgtttgatcgttagtcatcgctgtactccttttaaatcaggcagaaaccatcccgcccgtgtcggtcccatccttggctttaatttcaatcagtaacttgtgtggtaagcaaacaatggtttggcctggcttagaaattttgccacgcttaacatcaatctgattgaagcaattggcttcagtgacctcaatggcatgatcggttaccttaattttgttgtaatcaccgccggcatcgcgataagtgaagtggctaacaccgtggtgggtggttaggttcactttgtagacggttttgccatcatgtttgacgtaggccgtcaatacctgcgcgtttgaatccgctgcttgcgtcgtttgccattcgtgccaactaaaaacagcaactggggcaaacgatagaataaacagaccgatgactactattatatcaccagggcgaatcattttgatgtaacggttagcgcgaatttgtttaaacataggcgtcagtctttctctctaaaatagcaataaaaggggttatgacaaaagcctgtctgtcataaccccctccttttgatagctgtgaattgcttttataatgtgctttcaaaagcattctattacgtttaacactattagccaaacaactagctacgctagttattcgtctaattttgctaatccgcatagaataaacgcttttgacgcactcagttttataacgtgctttgaagttaactttctgcgcttagcgctgtgaattaaatcatcgactatgtcgctaattcgcttccctgggctaatgctcaaagtcaaatcgtttcaaacgcactcattgatttttgtatagtgcacgttgttggccgtagcgccagtgaccgagatgtttttgtaaatatggaacagcccatttatctaatccgaaggcacggcctgaaccgttcatgcaggcgagggccattggaataatccaaatattaacccaatagaacatccctgaaaggcagaatgtgataaccattgcaacggttgctgcgctcgttaaccaagtgaagagaccagcaattaaagctaagccaattaaaatttcaatgatggtcattgttttttgcatgaagaaggcaacttcttggtttggaatcaagaccttcgtgatgctgtagaaccagtggggcatcttatcgaagacgggcattggatcatgaccgaataagtaagaaaggccgaatgtgactttagcagttgctggttcagcagccccgcctgcagcggcaccgctggcagcacttgttgcatccgccgctttagaagcaccgctggtgacagctggttgaagccagtcaaaaggtaaccggagcttattggtgaaccaagaaccttcaccttgaaccttgtcccaacaatcaacgagccacattgcgcctaagaaaattcgcgcagggactgtccataaaacattaccataccgtgaaatatgaccgcgcatcaagttgcgatcgttcttcgttctgaagaactcattcattgaatagtggaatagatcgtagccagaataaatctgaacaaaatagagcatgttgactaaatgtttaactaatgtggcaaagaacccactgagatggaagaaattcatcaagttggcaaccgcatagcgagaaccaattgaaaccatgaagccggaatagcttcctttgtatgggacttttgctttaccttcttcagttgcgatgatgttctttagggctgttgcagcagatgcttcggcgccttgaacaatttggggttgaccgcggccgtcatcagtttcatcgaagaaagccacatcgccgacaacgtaaatcttgtcatcgtcaacagattgcatgaattcgtttgtcacgattcggccggctttaccggttgttaggccaaattgtgccgcttgtgaggaagctttgacaccagctgtccagattagagtggcagttgggaaagttgaaccatcatttaaatcaacatgcatttcgtgaacacctgtaacaccggtgttcttgcgaacgtcaattttttgtttagccatgtagcgttctgctttggctgcatcgttgcggtcgagcatgttcatgatggttggtgccatctccatcattgtaaattggatttcttcgggatcaatcttgttatcagctgctagttcatcacgccagtcgcgtaattcgccgatagtttcagttccggtaaagccagaaccaacaaccacgatattcaaaagggcccggcgtttttctgggtcgtgttcaattgccccacgacgaacaacatcgataatatgttgcttcaattcaacagcctgttcccatgaacctaaagtgaaaccatgttcggcaaccccaggtgtgccaaagtcgttaggctcactcccaatccccaacataacttgatcataggcgtagcgtccatgttcagtaatgacggttttgtttgcttgatcgatgcgggttaccgtatcggtcaccaacttaacgtttttgcggcgacagaagagatgttgcaaatcgtgttgaacgtggtcttctggcacgcggttagcagctacttcgtgtaattccgttaaatacgtaaagtaggaatgtttgtcgattaatgtaatttgataatctggattcttcttgtaatatttcgcaagttttttagttgcatagatcccggcaaaaccggcaccgatgatgacgatgtttttttgagccatgatgagccacccctcaatgaaataagtgcgttttcaatcagtgttcattatacagaataaactaaagattgtctatttattcacggataagattaatggggttgatgactattaaggaaaccgttttaaattgtgtaaaaccaaagttaatcgccgtaaaataagtgatttaaaagacttgaactttttacacaaaaaagataaactgactttgtgtgaaggttgacacaaattatatgattatttatgaaaagggcgggaaaattatgaaattaagtaaaacattagctagtttatcagttgttgcaatgtcagcaatggttttagcagcttgtggtaatagtaataacgctaaagattcatcttcaaaagaggcaaaatctagttcagtcaaagaatcatcaagcaaaaaagcaaccgctaagaaacaagttgccggcggtgaattaaaagacggcacttacaacttagaagaaaagaactacgaaaataattatcgcgttaagatgtcaatgaccgttgccggtggcaaagtgacaaagacaacttgcgattacgttgataaagatggcaagtcaaaacaagatgacaagacatacaacgaaaaaatgaagaaagtttcaaaaacaaatcctaaagaatatattcctaagttgaacaaagaatttacagataaaggtgcagatgtttcaagcatcgaagtcgtatcaggcgcaactcatagctcaaattcatttaagaattacgcacaacaattagtgcaagctgctcaagctggcaacactgaaacaatcgaaatcgacaatggtgctaagatgcaagatggcacatataagttagaagaaaagaattacagccatgactatcgaacagttttcacaatggtggttaaagacggtaaaatcactgaatctaaattcgataacatcaacaaagatggcaagtcaaaagctgacgatgctgcatacaacaaacaaatgaagaagattgctaagactgatcctaaggaatacatcgctaagttgaattctgaattcgtcaaagcacaagaaccaggcaaagtagatgttgtttctggtgcaacagaatcatcacacagcttcgtcaactatgctgaacaattagtcaatgctgcacaaaaaggaaatacagcaacgattacagttgataacatcgtttacggtgaataaaacgggacttcagcagtcagctgccaatgaattaatgggtaactgtctgctagaaggtacgatgaagctaggacaagtcaatttgtcctagcttttttaatggaaggaagtccgagatgtcttttaaaacgtttttagaatttgtccggattgaggtcaagacggcgagtgtcttgcccttaatcttagggattgtttattgttggtacgttaatggccagctgaatccagtgacgacagttgtttattttgtcgcccagttttcgattgcattatttgtgactggctttaataatgtgatggattactacaaagcagttgatctggattatcgggcacagacgaatatcattgggcgcaaacatttgtcgccaaccaaggcactgcatttaatgctctattttttattgttcagcatggcagctggaatttggttggtttggcaaacgaacattttattactattaatcggtggcgcctgtatttttgtggccgtcttttacacgttcgggccagttccgctgtcgcggatgccggttggtgaattgttgagtggtgtgacagaatcatttggtgcattttttatcatggtctatgtcaacgtgccaagcgacagcatcatggcgctccattttgattggccgacgtttacccttaaaggtcaattaccaacattgcttagtttatgcctaatcggtgcgattattgcaatccccacttcgaacattatgttggcggataatatctgtgatctagatcaagatcggcgcaatgaacgttatacactgccgcattatttaggaacaacctgggcgttgcggttgtataatacgttgatttggttctcactagtggccgttgttgtggcagtgattacgaaggtcttaccaattgaatcgttactattgttattattgattcctgtcattttgcgcaataatcgccggtttaatacgcggcaactgaaggatgtcacctttattaccgcgattcaaaatgcgatggcgatcaatattagcttgattgtcagcttgttattagcgattgtccgcacgacctggtggggataatccaccacattgacagtttggtcaacacatgataaagtaaatgggataaacgtcaattagagaggggcttttcatatgggtgttaagaaagtcgccttagcctgtactgtctgtggctcacgtaactactatgttgctgagaacaagaaccggacagaacgtctagagttaaacaaattctgtaaacattgtgggcaatactcacaacacaaagaaacgcgctaattaggaggaaataagatgattaagttttttaagagtgttggtcaggaaatgaaaactgttagttggccagatgccaaacaaacacgtaaagatacatcaacagtcgtcatgacctccgttttattcgccattttctttggcgttgttgattttgcaatcttaaaagtactacaattatttatcttttagaactggcttaattaagtcggatttgctatactgatggcaagcaaaaaacttcgcgtggtcggagtttttttattttggtatttaaaaggagaacgcacatggttgaatcaatcgaaaaaagctggtatgtcttacacacatattcaggttacgaaaataaagtgaaggcaaacttggaatcgcgtgcccaatcaatggggatggagaacaatgttttccgcgttgtggtgcctgaagaagaagaacatgaaatcaaaaacggtaaggacaaagtcgacatgaagaagactttcccaggctatgttttggttgaaatggtgatgtcagacgaagcttggttcgttgtgcggaatacaccaggtgtgacaggcttcgttggttcacacggtgccggcagtaaaccagccccattattagacgatgaaatcacacaaatcttgcgtcaacttggcatgagcacccgtcatttggatgttgagttcaaagtcggcgaatctgtgaagattatcgaaggggctttcgctggccttgttggtcaaattacagaagttgacgatgaaaagatgaaattaaaggttaatatcgacatgttcggtcgtgaaacagcaacagaattagactacgaccaagtagacgaactagtttagagtgcgacttcaggcgggatgactgaaggagcacgtttcgaaaaaagagtgcgtttgaaacggattgactctgagcattaacctaatttggcgaattggtgctacaagcgccgatttgacaaatgtagttaagcgcaagagtcagtttcaaaaagcacgtttcaacaattaaagtagggggctaggatttgtcccaagccccaacaagataggcggctgagacgaaagatgatttgtctcagccgctttttttgaacaatcaatagtgtctatttcgaaagaatgatgtgatgacgatgtggtatatcattgatcaaatattaattgcagtgggcttagtcatttttttgttagtcttactggtaggactggatttttacaaattaatccgggtttcggcacattggcggccgcgcgcacgtttatatacaaaacaaccaacgctattcattcatggctatcgggggaatcgctattcattcggtcacttactcgggcgcctacaaaaagccggaattgctaagaagagcatggtcatttgggtgggcagaaacggtcgattgcatgtggatggagacgcagcgttgcaggctaataacccaacgattcaagtcttatttgctaataaccgcgccgatgtgcaagatcaagtccgttggttagctacgattattgaacacctaaaagaagcgtatggcgttacgcaagttaatttagtagggcattcgatgggcgcaattacggtgttgcgttatttgttgacatcagaccatgccgtggtggacaaagtgatattgttggcagcgccagttaatgatccatcaattggtccggatacaccacttgttttttggagcgagttaaccagtcgtggaccagttaaacgaacacgtaattataattatttagccgtgcgggccaagtattttccaactgcgatcagtgtcttaaacattgctggcgagttactaggaactaatcgacacgatggttcggtagcagtcgatagtagttttgcattgcgtagcctattaaaaggacacgtgcgccattaccaggagatgttagttcgtggaccgggtggagcacatagcatgttgcacgaaaatcgtttagttgatcaagccattgatgatttcttgtggcgcgattaatggaatcgccttgctttttcggcaattgcttggtatattattaaggtatgttttcatacactagtgggagaccaaatataatggccatcttaaccacatcacggacttaaggaggtatgtttcgtggctaaaaaagtagcaaacatcgttaaacttcaaattcctgcaggtaaagcaactccagcaccaccagtaggtccagctttaggtcaagctggtatcaacattatgggctttacaaaggactttaacgctcgtacagctgaccaagctggtttattaattccagttgtgatcactgtttatgaagatcgttcattcgactttgtaacaaagacaccaccagcagcagttctcttgaagaaagctgccggtgttcaaaaaggttctggcgaaccaaacactaagaaggttgcaactgtaactaaagctcaagtgcaagaaatcgctgaaactaaaatgcaagacctaaacgctgcagacgttgaagctgctatgcgcatggttgaaggtactgcaagaagcatgggattcactgtcgaaggttaattcatgcttgacactttcagtcggattttcaatgaaagttgaaaaatcaagtgggaggtcaaaaaccgttcaccacaattgcaaggaggaaaaccctaatggctaaaaaaggtaaaaattatttagaagctgcaaaacaagttgatgctactaaagcatacactgttgaagaagcaatcgacttagtaaagaaagttgattttgcaaaattcgatgcatctcttgaagttgcatatcgtttaaacgttgatcctaaacaagcagatcaacaaattcgtggtgctgtcgtactaccaaatggtacaggtaagacacaacgcgtgattgttttcgctcaaggcgaacaagcaaaacaagctgaagctgctggtgctgacgttgtcggcgcagaagatttagttgaaaagatccaaggcggctggttagactttgacgttgccgttgccacaccaccaatgatggctcaagtaggtcgtttaggccgtgtcttgggacctaaaggcttaatgcctaaccctaagactggtacagttacaatggacgttactaaagcagttaacgacattaaagctggtcaagtggcataccgtgttgataaagctggtatcgttcacgcaccaatcggtaaggtatcattcgatgctgctaaattagtagaaaactttaaagcgatgcaagacgtgatcatcaaagctcgtcctgcttcagctaaaggtcaatacattacaagtttatcagttagctcaacatttggccctggtgtcaaagttgacgttgctagcttctaagttggtaatgcaaaaagcgctcatccgaaaggatgagcgctttttttgttgctataattaagcattaatgtcgataatttcgaattttgtgacatccactaaacctttatctgtaatccgcaagttcgggatgacgtcgagtggcattgcgccgagcttcataatcggatcgaagtgagcggtgacgtggagtttatcgtggcaaatagcattgaaggccttttgatgttcaattaaagtgtcgatgggttcgttactcattaagccaccgatgacaaatggtaatgtcgtgatgacttggtcatcctgaacggcaacgccaccgccttggctttctttgagcgcttcgatggcaacgaccatgtcagcatcgttggtgccgactactacgaggttgtgactatcgtggccgatgctggtggcaatcgcaccgttcttgatgccaaagccgttaagcaggccaaccccgacattgccagtgagatgatgtcgttcaactacggccactttagcgatgtcttcgtcaggatgatattggaaatcaccgtctgcagtgtgagcgaccggtaagacgagattttgcgtccgactgatgctttgtaagccgatcacgtgggctttatcgcttgtaaggttgagttttaattggtgagcggtgaatgtatcgaggtgtacagtttgtaacaagtcatcaaaaccagtaactgaatcttcagttgttagtaggtatttgccgctggcagcaactttttgaccattgatgaaggtttgattcacactgaattgttcgagatcatcaaccaataggaaatcggccttcaaaccaggtgcaatcccgccgcggtcagctaagccggtacattgggcagtgttgatggtggccatttggattgccatgatggggtcgatcccgtttgcgatagcaacgcggatactttcatccaagtgactagttttacggaggattacggattgtaagtcgtcaccgcagagacaacagaaacgtgcgttttgcggcgtcacgcctttcaaaagggttggcatattcttagagacggtgccgtagcggagataaacatacataccgcgactgatgcgatcgagcatttcatcgacttgggtacattcgtgatcgttacgaataccggcagcggcatatgcgtttaagccttgttcttttaaagcaggtgagtgaccgtcgatgagtttatttgcgttgagtgaaacgagtaattcgtctaaaacgccatcatcagcattgacaacaccgtgataattcatgaattcggcaaggccgtaagtgagtccttggtcataagattgttgaatctcatcagcggtaatcacagcaccagatgtttcgaggcttggattagcagcaggcacacacgagggcatggtgtacttgatatcaagtgctgtctttttggcagatgcgaccatgtattcaagtccccgcatgccagcgacgttcacgatttcgtgtgggtcggccaagatcgttgttgtgccatgtggtgttacaagtgatccgaagacagcgggtgagacattggcagattcgatatgaatatgcggatcaatcaaacctggcacaacatattggccgcgtgcatcgataacttttggtgcaaggtagtcgtcgctgataccgaggaagcgaccattaccaatcgcgagtgtgccttcaataatgcggccattatagacatcgacgacctttgcatttttaatgaccatgtcggcagcttgacggccggcagcttgatcaattagttgttttaaagttgttttatccatgagtaatctcctttatttagcaggtaattcgtgcattgtgaagagtaataataggaataagagcgcagcgacatacataatcggatgcacttttttacctttgccagcagcaatcatggtgatggtgtaagtgatcagcccgaatgctaaaccgtatgagatattataggttaatgggacgcacagaataatcatgaaggctgcaaaagaagtttcgaattctgaccagtcgatgttggcaattgacttcatcatgaatgaacccacgatgattaagattggggcagtcacttgcgacgtcacaacggccagtaaaggtgagaagaataagcttaagacgaacatgatggcgacgaccacggcggtgaaaccagtccgaccaccagcagcaatcccagttgatgattcgatgtaacaagcagttggggttgaaccgaaaacggaaccggcaatcattgaggttgaatcggcgaaaagggctttgccgacttccttaggcatcttgttgcccttgatgaaaccagcttgttgagcaagtccgattaccgttccagttgtatcgaagaagacgctgaagaaaaagacgagaattacgacggccatttgaacattgaagacgttgtggatgttcatgattgagacaccgaaagtgggtgctaagcttggaattgaagcgatgatgctgtgaggcattgcgattagaccagtcacgactcccatgatggctgtggccgccaaaccgatgaataaagcgccagggactttgcgggctaatagagcaacggtgacgattaaaccgaagacggtcaaccaaacgtgcggatctgaccaactcgtaatggtgacaaatgatttagcactactgacgacgatgcccccttgttttaatccggtaaaggcgatgaataacccaatcccgacggccatggcggcttttaaattagcgggaatcgcgttaatcacgacttcgcggacttttaagaccgtgacaagcatgaaaaggagggaagcgacgaaaacaccggcaagtgctgtttgccaaggaattcccatgcctaaaacgacggaataggcgaagaaagcattgctgccgagtccgggtgcaacggcgattgggtagttggcgatgaaggccatggctaaacagccgaccactccagttaatgcggtggcgacaaagacggcccccttatctaggccggcgtcgcctaatatagttgggttgacgaataaaatgtatgacatcgcaataaaagtggtaattccggcgatgatttcggttttaatggtcgacccacttgccttaattttgaattgacgttcgaaccagttcgttcgtgattctgttgcaatatcaatatttttatccattatgcacctctgaattagtattttaagaaccttggcattattgtacaacaaaacaatcgtgtttttaagaaaaatgtgaaaaatatttattattttgtaaatatcgttcgtgatttggtgatgaaaagggtttattttatcaaaaaagagccattagcgtgaaaaacgctaatggctctctcataattcgcgattaatttagatggttgctaggacgtgattagcaatcgctaattcttcgttggttgggatcatcaagactttgatggctgaatcgggggtactgatttgacgggcacctgagccgttttcgttcaattcaagatcgatttgaacacctaaaacagccagcttggcacagatatcagcacgtaaacgggcgtcgttttcaccgatgccggctgtgaaagtgatgacgttcgcaccaccgagttcaacgtggtagctcgcgatgaacttcacagcagaagtgatgaacatgtcgtaggcgagtttagcccgtggattggtagcgcgtgttgattgaatatcgcgcatgtcagcggaaacgcctgaaacgccgagaatccctgatttggcgttcaaaagcgtgatgacgtcatcggcactcttatccaattcgttcattaagaatgggacgatggccgcatctaatgaaccagcacgagtgcccattggaacgccttctaacggtgtgaagcccattgatgtatcgacaggcttaccattttggctggccgtaattgaagaaccgccacccaaatgaagtgtaattaattttaaatcggcaacgggttctttcaaaaagtcagctgttgcttgtaagatatagctgtgactaatgccgtgttcgccatacttgcggatttgatagtcttggctgtattcataaggtaagccataaaaactagtttcatctggcatatcgagatagaattgactatcaaagacagccacttgagggacattagttggtaaaatatgcatcaaggtttcaatgcagtcaacttgcacgggattgtgtaaaggtgcatacttgtcgagttgttttaatgtatctaagttggtgcgatcaataatggttggtttttcgaacgtggtagcaccggcaacgacccggtggccgaccgcaatgatgtctgcgggtgaatgaatgatgccattgtcttcaagttgtttcaaaagtcgaagaacaccatcttcataggaaagattagcaatggcgacttgttctttttgaccttggaacttgaaggtgaagctagcttctggtgtgttcatgcgttccatgagcccgcttgccagtaaggttaaatcagattgttggaatagttgccatttcaatgatgaactacccgcgttaacgactaaaatattattcaaaaaactgcacctcttacgattaattttcttgatagtctcaattttaaaccgttttttcagaaaaataaaataagtaaaacgtaatgctaggataactaaaattaagtgccgataatgattgacgctttatggaatccatgctatatttgtagttggttatttatgctaccgaagactcaggtgccaataggcttaatatcctgccgaggaagatacgttgaaatccctctctatgtcttggtggacatggagttttttatttttataaggaactcttgaccacaagttttacaaatctaatggaggtgaatcaattgagcgaaacaatcattgcaaaaaaagcacaaattgttgacacagttgttgaaaaattcaatagtgctgtttctatcgtcgttatggattaccgtggcttaacagtagaacaagtaactgaattacgtaaacaattacgtgaagctggcgtacaaatggaagttgttaaaaacacttacttgcgtcgtgcagcagacaaagctggttacgaaggtttggatgatacattcacaggccctacagcagttgcattttctaacgaagatgttgttgcaccagctaagatcatcgctaactttgctaagagtgctgatgcacttgaaatcaaaggtggtatgattgaaggtaaagtggcaacacttgatgaaatcaatgccttggctacattgccaagtcgcgacggtttattatcaatgttactttctgtattacaagcaccagtccgcaatgtcgcatatgctgttaaagcagttgccgacagcaaagacgaaccagctgcataatttaaaattgtgtagttaaaagtgttatcaaaaaatattacccacaaaatggaggaaacaaaaatggcattagacgtaaatgcaattgttgatcaattaaaagaatcatcaatcttagaattaaacgacttagttaaagcaatcgaagaagaattcggtgtttctgcagcagctccagtagcagcagcaggtgcagctggcgcagacgcagcagctgaaaaagacagctttactgttgaattatcagaaatcggccaagaaaaggttaaagttatcaaagccgttcgtgaaatcacaggcttaggcttgaaagatgctaagggcttagttgataacgctccttcagctcttaaagaagacgttgctaaagacgaagcagaagaaatgaaagctaaattagaagaagttggcgctgtcgttaacttgaaataatttaaatagagcgcccttggcgcttgtttagattttgagcactaacctaaaatcgggcatcgtggcgatctaagccatgatgcccgatttgtagttaagcgcagaaatctagcgccaatggcacgtttcaaaataaagtgggtctttgtcaactggtgttggtggcgaaatattagaggtatttgtcgaaaggcagatgcctcttttcttatcccaaaattaattggattcgggtaaagaaatgctgaacgttcttaaaaccataacaattacgtttaagtgtttttatttttcggtttaaaccttctataggcccgtttgagaaaggatattcgagagcgtttttaatataatggcgatttcgctttagtgttcggatcgtcacatctagggggctgttagatggtgtatatgtatctagcaggtgttctattgcttgaaagttcttagtttgaactgcgttcaaaatggtttggtaagcttgatagacacgcgaaaactcgggattatattgtaatcctagatcaacaatattttgttgtgtcgtgtattcatttaaaccgcgataatatttaatatgctgggcatctaaaagtgtttcactcttattaaatagtcgccaatgcgttttaagtgctttgtacgttcggttgtgatggtcctcggtttgtttaacagttaatatacgggcatcagttagtgttcgctgaattagttggataatatgaaatcgatcaatgataatttcagcatttggaaataattgatgtgcatacgttgcataatcggcgttcatatcgactgtgacggtttcaacttgttgtcgctcgtagagcgaatattgattaagaaagaactcaataattgttttcttctttcggtctggtaataagacgagctgcttatgtgtatctgcatcaatgccaataaaagcgtactcgtttttcttgatactaaattcatcaaaactgagattgtgtggcagtggcttgtgatgccagtgatagtggctatttttgtataaaatccgattaactgagctaggcgaagcaccaacgagtttcgcaatctctttgagtgttaaactatcttgggctaattggatgattcgctcaataatatcttgtgtgaaaatactattgaaatttaaaaacggactacgtgcaaaatggctagagtggcaatttttacagtagaaacgttgtttaaataaccgtaaccgataagggatcccattcagactattaatatcgtaggtaacttctttgaagccgttcttaatctgtgcacaaagcccacagtcaggacaacgtcctggtttatagcttaatttggctttgattattttggttctaatatttttgatgaatgtattataaacctcgtaaggtttaatattctcgtctgtaatatcaagtaaatttagtatataatcagtgttggacatcttaacgcctgctttcatttttggtttagtcacttaaaagcgtaacgcagaatatcgttgagatgttctatttttttgtcataaattaaaaaaaggtgtcagtagaatttcttctaccaacaccagaaagtttagacccaataaagtgcgtcattaacgggttgcatttgagcatttgactgatgtagcaaagcgcagaaagcagttaatgaaagcacgttttatttctaaaagaaccccactaatgtggggttctttttttacatatttttttgtaaaacataaatggcgagttgcacaaaataacacgatgctaaatatggattccatatcttaagcgacagccattgctgttgagaactaaaaaggcaatcagaggatattgattgtcgggtgaacgggaatcggattgtgctccgggtaagtaataagcgaaaatcataatctaacagccatctaacataattgtcattttactgtgttttgccttgggatagcttataattaaattaattaagttaaggagcggttgatatgcgaaaatggggcaaacacatatatgaaggaattcagcgacacctaacgttgttaaaaggcatcttcatcctttcggtgatggtctttgttatcctagaagtcggccggattttccgggacttgaacggggaacaattgaaagcgagtttaacgacacaaagtccgtggaccttgctagcgatgctggtgattgggtttgtggcggtcttgccaatgctcaattatgatttcgtgattgcggagttgctgccggaggactattcattctggtataaagtcaaatctggttggatcgtcaatacgtttacgaacattgccggattcgggggcttcttaggtgcgagtttacgggccaatttctatggtaaaaaagcgtcacaaaaagaaatcttaattgcgatttcaaaaattgcgctgttcttattagccggcctgtcaatctggtgtctgattagtgtcgttttgatctttggctttggtattggtgggatgtatgccaactactggttatggctagtgggcggttcgttgtatttccctggtctgatgattagtacgcgctttaaaaatgcggcctttttcaaagatctttcgatgcaacgcgttttacgcctaacattagggtctttcttagaatggggttttgcgggcggctttttcttaacgattggttatttcttagagattaagggtgacttattacaagtcttaccacttttcatgattgccaacatcattggtgttatttcgatggtaccagggggcttaggaacgtttgatttgttcatgatctttggtctgagtgcagtcggcgttcaaaatgcggacgccgttgtctggttgtcattttaccgagtcttttattacatcgtgccgtttttagtcggcgttggtttatttactcacgatgcaggcagccggttaaatcattatttacagggcttacctcggcaggtgatgcaaaaaatcgctcatcacttcattgttttcttcctttatatttcaagcatcattctattattagtagcaactgtcccgaactttgcgattaccaacacagtgattggacagctctacccatacacgttcttcttcttagatcgtgtgacaaacatcattgtagcgtttgtcatgttggccttagcccgcggcgttgccaaccgcgttcaaaaagttttctggccgttgatggtgctattggtgattgcgattaccaatacactatggcgggatttctcaatcaaactcgctgtctttttaacttttgtgctcgtagctagtttcttattgaaacgcgaattataccgtgaacggatcgaattttcatggaatgatcggattgtggatggtgtacttttcgtgggcgccttcttgttatacggctttgttgggattgccaattcgccacacttacggcatcgcaaacccgtaccaacagcgcttttatttccatccgaaagagtctggttggctggttttatcgggatgttggttgccgcagggaccttatatctcgtctaccgttatctcagtcgagggggccgttcaatagcagcgccatatgatgaagcacgaattgctaacgtgattaacacttacggcggcaatgaggtcagtcatttggcatacttacgggataaatcagtttatttctatcaggaagaaggagaagatcaggtattcttgctttatcgtaaaaaagcggatcgcttaattgtaatgggtgaaccagtcggaaatccggctaaaattttaccggcaattgaacagatgatgcacgacgctgatttgattgattgtcatttagcgttctacgaaatttcaagtgaattaacgatgcaactgcatgaaatcgggtttgactttatcaagtttggtgaagaaggctacgtccgtttggcggacttcacgatgactggtaagaaacggcgggctgaacgcgccttaatgaataagtttgaacgtgaaggctatcaatttgaaattttaaacccaccatttagtgccgaattaatggcagaactcaaagcggtttctgatgattggttgggtagtcgcgttgaaaaaggcttctcgttaggctttttcgatgaagcatacctccaaaaagccccaattgcagttgtctataatgccgatcaccaattaattgctttcgctaacgaaatgccaacaggaaccaaagaagtcgcaagtattgatctaatgcgtcacagacaagacgcgccatctggtataatggatgagatctttattaatctctttgaacaaaatcgaacggatggctacacgtacttcaacctcggcatggcgcctcttgcaaatgtagggacttccgagtttagctttattgaagaacgaatcgctcatctgatctatgaatacggctatcacttctacggattccagggattacggacctataagaagaaatatacgacggaatggcgttcgaaatatatcgcttatcaaaaacggacctcattaattttcacgatggttcaagttttaatggtcgttaatcaacgggttgcggatcaaccgcatcctggtggcttgctaggtcgtttgatgaagtcagttcaaattgggaaattttcagataactaacgacaaatgaggaaaaaagatgacagagtattactattctaaaaatccagacgttgaacacgctgagcggcaatggacgtttgaattacgcggctttaattttaaatttacaacggataacggggtattctctaaaagcactgttgattacggttcacgggcattgctagcagcggtcgatctgagtgaagcgccagctggtccagtgcttgatatggggtgtggatacgggccaatcgggatgacgattgctaagctcgcaccagagcgccgaatcgacatggtcgatgtgaatgaacgggcattggatttggcacgtaagaacagtgaattgaatcagattaccaacgttactgtattcgaatcagctgaatatcaaaacgtaacggatcaatacgccgccatcttcaccaacccaccaatcagagcgggaaaagatgtggtgcaaaatattttgactggtgcctatgatcacttattaccagatggtgaattgaacgttgtgatccaaaagaaacaaggtgccccatcagcgaagaaaacgatgatgagcatttttggcaacgtgcaaattattcataaggataaggggtattacattctccaaagtattaaattaaagtaaggaccggggttgaaagcggtaaattcaggcgaattgtgctaaactatgattaaagtacaaggaggttgatacgatgaaaaccagatataaaattttaatcggcgtaggggtgactgcagcagttggcgcaacgaccgcttttgtcggttctaaggcagtaatcgataaagtatcgcgctatcgcaaacgattagcagttaaaagttttgtaaaagacaaattacatggtaatcaaaaggcgttagagttggtcgatcaactctccgatgcggatgtgaataacttgttgactgcggcagacaggttaacccaattaaaagataagctcggagaacacgcagacaatctaccagatatgatggatgatttgcgccaaacactaatggcttacgcaacaaaggtgaaagaaaaactatagagtgcgactcgagttggtcaggctttgagcattaacagtgaaatgagcattatggcagtccttgccataatgctcattttgcagttaaacggaagaggatggcttatggagcaattaaaaatggtatcgacaatccgtcggcaccatttttaattgctcgactagcgcgactgtgttttaatagttgagaagtaaaataaaggggcgactaacgcgtgagtgaaacacaacaagagatcgatcaatggatgcaagccgccatcgatgaagctaaccaagcacgcatcattggcgaggtaccgattggcgccgtgattgttaaagacggacaaattattggacgggggcataacattcgcgaacacgcgcaagatgcgacgttacatgctgaaattctcgcgattcaagaagcctgtatggttgaaaagagttggcgtctggaagataccgcgatttatgtcacgttagaaccatgcccaatgtgtgcaggcgcgattattaatagccggattcccaaagtttattttggcgcgagtgatcctaaggctggtgtgaccggcacgttgatgaatttattaactgacaaacggttcaatcaccaagctgaagtggttggcggggtgcgagaagctgaatgtgcgagtttattgcagactttttttagaaagattcgcgaaaatcgccgtaaaaaaaagaaaatggctggtaattaatgcttgaatcaggtagaataggaattgccgaaaggccttgagacaatgatgagcctacgaatcgtgtcaggttcggaagaaagcagcactaagtttgttttatcatgtgtcttaagttttgtgaaaattaaccagacccaacggacaattaattttgtcggttgggtcttttttcatgcaacgcaatcaaaattgacggtaaaatatgctaaaatggaacaagtagttttaaatgaatcggactttaaattgcaaaggtggaggtcattaaatgagctatcaagctttataccgggtttggcgcccgcagcgtttcgatgacgtgattgggcaagaaacaatgacccaaacattgaaaaatgccattatgacgcaccaaacaagtcatgcttatttatttacaggcccacgtggaacagggaaaacatcggctgccaagatttttgccaaggcaattaactgtcattatcaaaaagatggcgaaccatgtaatgaatgtgagacatgtcgggccattacggctggcgccctcaatgatgtgattgaaattgatgcggcgtctaataatggggtcgaagagattcgtgatattcgggataaggccaaatatgcgccgacccaagctgattataaaatttacatcattgatgaagtccacatgttatccactggtgcgttcaatgcactgttgaagacgttggaagaaccaccaacaaatgtggtattcatcctcgcaacaacggaagttcacaaggtgccagcaaccatcatttcgcggacgcaacgctttaattttaagcggatcacggccgctgatttatttaagcgaatggcttatattttagatcaaaaggaaatgacctatgatccagcagctctgaaagtgattgccaaagctgctgaaggtgggatgcgggatgctttaagtattctcgatcaagtgttatcctttagcgacaatcacgtcacgttggataatgcgttggatgtgacaggcagcttaaccgaagcgttgttgacggattatgtccaaacaattcaggataatgcgcctaaacaagcgttgcaattgttgcaacagattttggctgaaggtaaagatgcccaacgttttgtggaagacttaattgaatatgtgcgcgacttactgttgtatcaacaagcacccgaattagtcgccgcaagtgaaatggatctattggatgaacacttcaaagcgctcagtgcagcgatgccggctgaccgtttgtacggggtgattgatatcctgaatgaaacgcaacagcaattgcgtttcacgaaccatccagaaatctatctggaagtcgcaacggtccgcttgacgcaagtccagacagcccaagtaacgactacgatggttgccgcaccagctgctgataatgaacaagtcgcagcgttgagtcaacaagttgcacaattacaagcggcgttacaaaaattggaagcggcgggaccagtgagtgcaccagctgccaagccaaaggccaaacctgctaagaagattagtaaaaaggtcaaccgtaaggcgatttatccggtattggcagatgcgacgcggaccaatttggagaatctcaaagaagtctggccggatctgttgaatatgttggacgttaccaagcgcgccgtgatgaaggtttccgaaccggttgcggcgagtcaaagtggcgttgtcgtcgcgtttaactacgcgattttattcgagcgagctagcaatgatcaagatcttttgaacattttagaaaacggcttgaatcgtttgactggcaaccccttcaaggtggttttagtgccccacgatgtttggccagaaattcgccaggaatatttacagaatcacgcagtaccaagtcaacaggtaacaactgatgacgaagcagaagcaacgccgaaaccagaacaaaaaccggccgttgtcgaacaagcacaagctttgtttggcgatgcggtggttgttaaaaaagattaacgtttaaatttgaaaggaagtaatgaagatgcgcggaatgggtaatatgcaaggtatgatgaaacaaatgcaaaagatgcaaaaagaaatggggcaaacacaagaagccctcaacaatacagaatttgtcggcaaagcagccaacgatttagtcgtggtcacaatgactggcgacaagaagatgaaagacattgccattaaaccagaggccatcgatccagatgatgttgatatgttacaagacctcattatcatggcaactaacgaagcgatgactgaaatcgataaacaaacacaagcccaaatgggtaaatttactaaaggcctcccattttaagtgagacattaaggaagtgcattgatgcaatatccagaaccaattgcgaagctgatcgaaagctacatgaagttacctgggattgggaacaagaccgcaacccgattagctttttacacgattgatatgaatgaagacgatgtgacgaatttcgccaagaacttaatttcggcacgtcgtgatctgcattattgtagtgtctgtggcaacattacggatgaagacccgtgcgaaatttgtcgcgatacaacgcggagtcaagacatgatcttagtggttgaacaaccgaaagatgtcatgtcgatggaacggatgaatgattatcatgggctctaccatgtcttgcatggggtgttatcaccgattgaaggcaagggacccgatgatattaacatcgccaacttgattaaacgattgcaaaaaacaccggctaaagaagttatcattgctactaatgcaacaccggaaggggaagcaacggcaatgtatatttcgcggttgattaaaccagctgggattaaagtgacgcgtttggcgcacggtttatcagtcggtagcgatattgaatacgcagatgaaatgacgttgttaaaagcggttgaagggcgtcaagaaatttaagaatggtgggtttgcgatgtttggtagaaaaaaaccgacattaaaacaattaggtgatcaagccttattggatttagtgtaccaagtcaaagataagtggcagatggcccaaaagacgcaagacaacgtccgcggactcgatgaccaattagagatggaaagtaagattcaacaagcaaagtttgaattcttattccgccaagcccgccaacgtaaagtagcaggtgaagcagtttcgaaagaagcagcaactagaaatacatttagatagcgcgggcattcagatgacagccgcagcgtgaagacaaggtcgagtgactttgtctttttttgtttcaaacgtctgctgtcgcacgctaaacgcaagaacataaccgccggatacgcactcttccctttacgtcttttgttgaatcaagtaaaatggaagtaactctatggatgaagaaggttgttttgtggtaggaaaattaattacgtttgaagggccggatggtgctggtaagacaagtgcgttgatggctgttgtaccgctacttgaatccaagtgcaaccaagacatcattgttacgcgcgaaccaggtggcaatccgattgccgaaaagattcgcaatgtcattttagatgttgaaaatacggcaatggatgaccgcaccgaagcactgttatacgctgccgctcggcgacaacacattgttgaaaagattgaaccagcgttggctgataacaaaatcgtgatttgtgatcgatttgtggatagttcaatcgcttatcaaggggcaggtcgtggcatcggtgaggaagccgttgcgcaaatgaacttatttgccactaatggattagcgcccgatttaacgttataccttgatgtaccatctgaagtcggtttacaacggattaaacagaatcgacaggatcaatatgatcgattggaccaagagaagttggcttttcaccaaaaagttcggcaatcctacttacaacttgcgcaagataatccagagcggattcaaacgattgatgcgaccgcagacttagacatagttgttgccaaatgtctgcaagtgattgaacaacgatatccagacttattcacagcatagaaaaggggagattgaaatgaaattacttttagcaattgttcaagataaagatagcaacttattaagcagcgaattaatcgatgccaacattcgggcaaccaagttgtcaacgactggtggcttcttaaaatctgggaatacaacgtttatcgtcggaattgaagacgaacgggttcctgaagcgcttaagattattgaaaaaacgtgtcaggcacgcgaacaattcatgacaccgcctgttaatatggatgccacgatggatagctcaatgtcatatccgattgaagtgcaagtcggtggggcaaccgtctttgtgatgccgattgaacagttccaccgcttctaatcgatggccagtttaacaattgaacagcttcaacccaaacttgtggcccagtttgcccagattatcgcgcgtggacagatggcgcatggttatctattagctggtgcacagggattggggaagacacaattggcacagtggttggcactgcgtctgttctgtcaacaagtgacaccagatgggcaaccttgtcggacatgtccggaatgtcagcggattttgacgcataatcatccggatgtcattgaaattaagccggaaggtaagagtattaagattgccgatattcgctatttgaaacaagaagtggctaagagcgggatggaatccagtcaacgcttattcattattgaagctgctgaaacgttaaccgccagcgcggctaatagtttgttgaagttcttggaagaaccggcgcaaaatgtttacgcgattttatgtacgagtaataaaaatcaaatgctccccacgattttatcacggcttcaagtgattgatctggcagcattggcaccacaaatggtgcaacaacagtttgaagcggctggtattttgccacaacaagcgcagttattggtgcatttgacgagtgacttagctgaagcacagaccttattggcggatgattggctattacaagtcagtgcgaagcttgccgcgtgggcacaaaaagttgaacaacgtgatttagaagcatttgtgcagattcagacgcaaattttaccattattagttgatcgccaacagcagaagacctttttaactttggtgggcttatggtatcaagatttattgaattaccgctatgaattaggcgccacaccttgttttggtgcgtacgaaagccagttaaaccaggccagcgccgcgttgactaccacgcagttggtcgctcagacggaatatgctttacaagcacaacgcatttttgaacaaaatattagttgccaaaacgtcttagagagtttaacgttaaagttaattgcatagtaaaacgcataaccagcgtatcgggaggatatcaacggtgattaaagacttatatgaacagttatcagacattgaacagcaagctaaattgacgtttgaggggctcagtgaaatgaaagcagtccttgccgaagtccttgagaaaaacgctgaattaaagattgaaaacaagcacttgcgggaacatttgcaagaattggaaccatcagccaccccgcaaacgggtaaggaaggggctcaagccctttcgaaatcaaaacaaaacttacagaatctttacgaagaaggcttccatatctgcccgtacttttatgggtcacgacgcgaaaatgacgagccttgcgcattttgtaatgatgtcatctacggcgaacgaacaaacgattaaaaaaggcagggcaaaagggatgcttacttttggcctgtctttatgtcattattgatgcatcttgaaaggatagaacatgcaaacacaatcaagttttaaaacgacggaaacgggaactttatttttagtaccaacccccatcggtaacttaggcgatatgacttaccgggcaatcgatacattgaaatcggtcgcactgattgctgctgaagatacacgaaatacgcagaagttattgaaccactttgagattgaaacgaaacaaattagtttccacgaacacaatacgcaacaacggattgaaacgctgattgaaaaattagaagccggtgacgatattgcgcaagttagtgatgcggggatgccatcgattagtgatcccggtcatgagctcgttaaagcttgtattgaagcgggcatttcagtggtgccattacctggagccaatgccgggattacagcgttgattgcttcgggcatcacaccacaaccgtttacgttctacggttttttgcctcgtaaaggcaaggagttaacggaagccgtaacgacgttggcacaaaagcctgaagcacttatcttctatgaagcaccgcatcgtttgaaaaagacgttgcaagctttgctcagtacgtttggcgccgaccgcaaagtcaccttggggcgcgaactcacgaagaagttcgaagaattcattcgtggcgacctagaagaagtgcttgcttgggcgactgaaacagaattacgtggtgaatttgtgatgatagttgctggaaatccagcaccagatgcaacggtcagtgcagttgcaacggaatcgctatcccttcctgaacaagtggaagcccagattcaacaaggagccagccccaacgtggcgattaagacggtcgctaaggcaaatggcttgaaaaagcaagtcgtttataatgcctaccacgaattaacagaatagaggtcacgccatgccaggaaagcaatattcagaaaactatcaaattccgtatttcgaaacggatatcaagggcgaattaacgctcgcatccttagtgaacattttaattttagcatcagagcatcaactcaatgcgctcaacgtcggtgaagcgacaatgcatgcgctcaatcttggttgggtggtcacgcagtatcaaatgaagattacgcggatgccgaaggtggatgaaaaagttagaattgtgactgaagctgagagttacaacaagtatttctgttaccggaatttctggttatatgatgaagccggcaacgaatgcgtcttcgtccaaagcatcttcgtgatgatgtcgtatgaaacacggagtatggtgcaagttgtgccggaaatcatggcaccattcgagtcaagtgagattaaaggtagcaaacgattcccacggattaagaagattgatcccgaacaagtgacgaccaaagaatatcgtgtgcgttatttcgatattgatggtaatcaacacgttaataacgtccattattttgaatggatgttggatgcgctcgattatgacttcttgacgacacaccgcgtagcaagtgtcaacatccgctacggccacgaaattcaatacggtcaaatgacccaaagcatggtcgaacaactcacagttgatgatataatcacaacacggcataaagtcgccgtggatgacctaagtgcagcagaagcggaaattacgtggaaagagcgctgagtcgaacgggttggctttgaggattaacgggataattgggattatggcgggtcttagccataatcccaattattcagttaaccggaaaaggcagttcgaggaagcacgtttaaacgaaagaaagccccattcacagataaagttgtgatgggctttcttttgttatcttcgaatatttattgaaacgtgctttttgaaacagctccctgcgcttaacccaatttaccaaatcggcgatttcatcgccaattcggcaaatccagttaatgctcagaagctaaccgtttcaaacgcactctatcgaaaacgtgttttcatcaacagcttcctgcgctttgctacacttatcaaatcggcgcttacagcgtcaattcgctaagttaggcaagtgctcagaagctaaccgttgatgacgcactctatgatgttgcgttgctgacaaattcttttaatgctgcgcctgttttgcctgcgctgaggccgacttgtagtttgaggcgtgcttttggtccattgaggccttggcagaaggtgacgcccatttgtttaagctttacaccgccgccttggtaatcgtagacgtcttcggcaatcccgttgaaacagcgagaaacaagtacgatggggatgttgcgatctaatagcgcttgaacagcgggtaaggttgctggtggtaagttaccagccccgagtgcttcgataacgagccctttggtgttgggttggttgatggcgtcgaataaagtcccatccatgccagcgtatgcttttaaaagataaacaggttcgacaagggttttgatgtcgcaaatttcagaacgaattaattcttggaagaaattcgcattgtgtttgctgaccaaaccgatgggaccaaaagttggcgttctaaaggttgcgacgttcgtcgtgtgcgtcttcgtgacataccgtgctgtgtgaatctcatcgttcatcacgactagcacacctttatcatgagcatcgtcagaagcggctgtccaaacggcactaatcaagttgtgtaatccgtctgcgccgatttcattcgacgagcgcatcgcaccagtcacgacgacggggatattgttgggaagtgtcaagtctaagaaataggcggtctcttcgagggtatccgtcccgtgtgtgacaacaacaccatcaatcccgtcttcttcagcttgttgaattcgattcttaaggtttaacatcacagcgggtgtgatgtgtggtgaaggcagattggcgaactcttcactttcaatgattaattgattatcgaacagctcttcaaagccggccattggattttgatctgtgggtgcaaccgcgccatcttcgtccgcagacattgcgattgtgccaccagtatggaggactaaaattttcttcatgtttaatgaacacctttctttaaatccgaattactcatctgtaagtatagcaaattttctgcaagagttgctgaaaaacgaaaatcaattgcttgtaattaaataacgttagtgatacatttaaggggttctaaaaattcggagtaggactgaagcgttaagtgctggtggaacggaatgtgaacaccagacgaaaagcagcaatgcttgcgatttcagtaccgcattcgccgcagtattatttgtggcagctccaaaagggagatgctttttatggttaatggtcagatttttggtgttaagctagacactagacgcgttgttttactagctgttttaattgctttacaattggtggttgcacgctttgcaatttcactaacgattttcagaattagttttggattcatcgtcaccgccttaatggggtggtggtttggcccagtttgggcgggacttgccgccgttattggcgacctcatcaatagtttgatgattggggtcccaggtggttatttcccaggcttcacactttcagcgtttctaggggctttcatctatgggtgttacttctaccgacaaaagattacatggtgtcgcgtgattgccgccgttgtgacagttgtgctgatcgttaacctcggtttgaattcatggtgggtgtcgattattagtcatacaccatttgggttccactttacggcgcgggccattggggaagctgccacattagtgattcatccgattattctatacatcgtgatgcatttcgaaccgattattagattaaaagatagagtattataaatgagtaggtgttatctatttgaagataacgcctttttttgtggaaaccggctttttatgctagaataacaaggattataagcagaagaaggatgaaataatgaagctattggcaatggatacctcgaatcaagcggtgagtgtggcactccttgaagatcatcaaattttaggcgaaatgactgttaatattcgtcaaacacatagtcagacgttacttccaatgattgatcaactattaaaacaaacaaaaaccaccattgaagatatcgatcgctttgtcgttgcagaaggtccgggttcatacacgggattgcggattgcggtgacaacggctaagtcttttgcttggacgcttaataagtcattggtcgggatttcgagtttagcattgctagcggccaatgtgatggatacgaccgccttgattgtaccgctgtttgatgcacgccgcgacaatgttttcgcggggatttatcagtggcaaaatgggacattgcaaaccgttgtggccgatcaacacgtttcactagaagcactactggcacaattacaattattggcagaacctgtttattttgtggggaatgacgttgcacactttaacgaacagattcaagctgcattaggtagtaacgcgcatttcgtgtccgccaaccataatttaccgcacgccagcgtcttgggtgaattaggtttgatggctgaacctgtcgcggatatccatggcttcggacccgtttatttacgcaagacggaagcagaagttaactgggcaaaaacgcatgatgagcgaggcgctgattcgtatgtggaacaagtttagggaatacctcaaaccccagatttgggtcaagaaagaaatgccttacacaactcggcgcgttgaaattgatgagacgacattttacttagcacgcgcgagtcaaaatgatattacggcattgttggacattgaacggtcggtctatgccggtcagacgccgtgggatcgttggaccttcactagtgagttgagcaagcgcaagacatcgttgtatctggttttatgccaagggactgaagtcgtagcgtttgtcggtgcatggttttcaaccaatgaagctcatattacgaatatcgcggtgcggccaagttatcaaaaacgtggtattggccactttttggtgcacgaaatggttagtttagcccacgattatcccagtcaaaaaattacactagaagtacgcgccagcaacacaagcgctcaagccgtttatcagcgattgggttttacagtggtgcggacgcgtcccaattattacattcaggaaaaagaagatgcattcagtatgtgtcggatattgagtcaataggagtcagtcatgtcggaaaaacgagaattaattttagcatttgaatccagttgtgatgaaacgagtgtggccgtcatcgaagacggtcatgttattttaagcaacatcattgctacccaaattaagagtcatcaacgttttggtggggtggtacccgaagtggccagtcgccatcacgttgaacaaatcacagtttgtacacaagcggctttagaagaggccggggttacttacgctgatttaacggcggtcgcagtcacttatgggcctggattagtcggcgccttattaattggcgtgacagctgccaaagcgattgcttacgcacaccacttaccattgattccagtcaatcatatggcggggcatatttatgcggcgcggtttgttaagcctttagaatacccattgttagctttactggtttcaggtggccatactgaattggtgtacatgccagccgccggcgaattcgaaattatcggtgatacacgggatgacgcagcaggtgaagcctacgataaaattggtcgcgtcctcgggattcaatacccagctggtaaagaaatcgatcggcttgcccacttaggtcaagatacatttaaattcccgcgtgcgatgctcaaggaagataatcttgacttcagctttagtggtttgaagagtgccttcattaacacagtgcacaatgccgatcaaatcggtgagacgctgaaccacgaagacttagccgctagtttccaagcgagtgtggtcgaagtgctcaccactaaaacgatgcacgccgcgcgtcaattaaacgtgcgccaactcgttgtggccggtggggtggctgccaatcaaggtttacgtgaaggtttggcgacagccattaaggcatccggaatggatttagacctcatcatgccaccacttcgattatgcggcgataacggcgccatgatcggggccgcagcgcatatcgaattacaaaaacaacaatttgctgatctaagtttaaatgcagtccctggtttggattttccatacggtgcataaaatacgaattcaaaaagcctgtcgataatttcgacaggcttttttgcttaaatggattgcttagttgattgtaaggtagtatagatgtccgtcggcagtgccactatcaacggactgagctgatccacgccaatcagtgttaaatcgtgcatagcacgtgtgacgagtgtgtagaggagatctacgtctgattgtgcgccgaaggtcttcttagagatgtcgtagccaatcacagcgtcgaactcgagccctttggctaagtataatggaaggattaggatgcctttgggtaaactacgggttgtttcaccgatgagtgtgacgtgttcatcaggtgttaaactagcgtagagttggtgggcaacttgttggttcttggtgaggatcgcaacggtcgcgtgttctgcctggagatggcggatttcttgggtcagtgtagcgagcgcttggtcgtttggcgtctcaatgacgcgcggtaggcgcccgtcacggctgaaggcttggagggctgtttcttttggcaagagtgccttggcgaagttggtgattggggcggtcgcgcggtaactcttggttaagctaatttggttgatttttaagcggggaaaagcagcggtcagttgatcgatgaagtggccggtttggtaggtcgccgtgaagacatcctgtgcgtaatcgccgagcacggttaatttcgcgttgggaaaggcgtggtggatgtagacgaactgagcgatgctgtaatcctgcatttcatcgatgaagaggtactgaatgccgtgattttggccgctgtcagttaataagtcgcgcaggtatagaattggggcggcgtcactgagcccgacgatgtggcgttcattgttatccgcgacttggcgaatcatggcgtcccaaaccttcgtagggatgtcggcagggcaagcaccacttaagaagtgttgatattctgtggattcatctaggaaataatcattgtagattgattcatagagtggggcgaaataactttgaacgatttcacgagcgatgaaagcttgttcatcatcgccagaatcgaattcgcggtcaccgacaatcgtccggtaagcatcatcggttaaggtatcgattttttcagcgacccagtcgagatgaacttcgaggttgatttggcgtttaagccgtttgatgagcgtgtttttagtggcgaggaatttgtcgccgggtaacataattgcggggagcgcgagataaatctgattcatctggtctttagtaaaaaatgggcggtcttcgaagtatagatcgttgaatgccaacggttgggttgaggcttgtttaacgtaagcttcaattgcgtgcatgaacgctgcgctttctttataccggcgcatggcttgtgtcattttaggaaaactggcttgatctttttcgaagcggtcgaagaggttctcaacctgtaagcctgagaagcgatgacttaagaactcggccatcgtcacttggcgcatgtttttctcgcctaaactaggcaggacttctgaaatataatggctgaataaacggttgggtgagaagagcaccatttggtcggcttcgagctgactgcggctgtgatagagtaaaaaggcgatgcgttgcaagacagctgaggttttaccactaccggcgaccccttggacaatcagtaagtcagcggttgtatcgcgaatgatatcattttgttctttttgaatcgtggcaacgatgttttgcatgtattcgtcactttgttcaccgaggacggcttgtaagagttcatcgccgacagtttcgttcgtatcaaagacgtgttcgatttgaccgttttgaatcttgaattggcgtttgagtttgaggtcaactttgacagggccatttggcgtctcataagtcactggaccgagtgtcccattatagtagatactcgaaacaggggcgcgccagtcgtagattaagaaattgtcttggtcgtcgataaaagtggcggtcccgatgtagagtgattccgtttcaccatcttcggtgatgtcaatccgaccgaagtaaggggagttgacgagatcggtcaggcgttcttgttggctagtcagtaatttttcgttttcgacagcggcggcgaccaattgcttttgttgttggaccgcggcgttggtttccatgcggtcatcgacttcggtaatgttgactttcgtattgtcgccgtaacgttgttcgatgtctttggtttcattgtaggcgttggccaattgttggttaatcactgtgaggcgttggtcgacctgtataactgtgcggtcaacgcgcgcttgttcttgttgttttgtgtcttcgtgtaacatagcagcctccaattgttagttgttatattataagcgtcttggggtaaaaaagcgaccgattgacattcattttaaaatccgttagtatgacagtaattcaacagacaaagtgaaggataagtagcaactgatattttcttgaacaggaagcggcgggactgagaagtcgtcaagaagttggttgtgaattgggccttcaatcgggaattagtgagtaactaattcgggtagcacccttatcgcgtgagtggcacggatgattttcgtgcaatttaggtggtaccacgtagaagcgtcctaattgtttaatcacaattagggcgctttttttgagttgataaattaaattggagggtattattatgaacaaaaaaattatcttaaccggcgatcgaccaaccggtaaattacacattgggcattacattggttcattacgcaaccgggtagcgatgcaagattcaggcgaatacgaaacatttatcatgattgccgatcaacaagctttaaccgataatgcgcgtgatcctgaaaaaatccggaacagtctcttccaagtggctttggattatttatcagttgggattgatcccgctaaaacaaccgtcttcgtgcaatcacaaattcctgctttgagtgaattaacgatgcattatttgaaccttgtgacggtttcgcgtttacaacgcaatccaaccgttaaagctgaaatccaacaaaagaattttgaacaaagtattccagcgggctttttaatttatccagtcagccaagctgctgatatcacggcgttcaaagcaacgacagttcctgttggtgatgatcaagaaccaatgttggaacaaacccgtgaaatcgtacggacgtttaacaacgtttacggacaagaaattttagttgaaccagaaggggtcttcccaccaaaaggcgaaggacgcctacctggtttagatgggaacgccaagatgagtaagtcattaggcaatgcgatttacctatcagacgatgcccaaacgcttgaaaagaaagtgatgtcaatgtacactgatccattgcatatcaaagtaaccgatcctggtcacattgaaggcaacacagtctttacctatttagatgccttcgatgatgatcgtgaaaaagtggctgaactcaaagcgcaatatcaagctggtggtttgggtgatgtgaagatcaaacgttacttgaacgaagtcttacaagcgaagttcgcacccattcgtgaacgtcgtgctgaatttgaaaagaatccagaagccgtttataagatgttagaagaaggtagcaagaaggccaatgctgttgcagaacaaacccttaaagaagtgcgggatgcaatggggattaattactttaactaatcctattcaaattaaaaaaacagttaaacaagtcgctgaatgacttgtttaactgtttttttatagactaatatagtgggataatagatgctttttgatggtactttaaagttgaatatgagagacttaattcaatttaagacagatgtaaacgctgtttttggtgtataatttgagaagttatcaacatggagcaaaggagaattgatatgcatgatttaactaaaggtaatccgttgaaattaattatcttatttaccggcccattattgattgggaatatttttcagcaactctatagtgtcatcgataccttaatcgttgggcggacaattggtgttaatgcgttagcagcagttggctcaacgggtggattgaacatgctgattatcggtttttgtacagggaccacggctgggttgtccatcttgacagcccaacgctatggtgctcaagactatcgcggcgttaagcgcagctttgcgacgagcattctgattagtttggtgataaccatcattttgacagttattagtctattatttgctcgacatattttggtcatgatgaagacgccggccagcatcattgttgatgctcaacggtttattatgattatctttggtgggatttttgcctcgatggcgtttaacttactttcgaatatcattcgcgcacttggggatagtcgaacccccctctttttcttagtaattggggtcattgtgaatattgtgttagattttatttttattttaggctttcatatgggcgttgaaggggccgggtttgcgacggtctctgcacaaataattgcgactgtgttatgcttactatatatttatcgccgcattccggtcctcgttttacggccgaaggattttcgcgtgacgcgcaaagatgtcatggatcatctcaaggttggattaccgatgggctttcaatcgtcaattattgcaattggctcaatcgtgatccaaatcatgttgaatacattgggtgctagcgcggttgctgcttacacagcggctgggaagattgatcaattagcaactcaagttgggaattcatttgggattaccttggcgacatattccgcacaaaattacggtgcacgtgaatttggacgaatcagtaaaggggtccgccagacactaatggtgtcaatcatctttagtttagtgatgggcgcgttgatcattgcctttggacgaccactggttaacctgtttatcgggaacaatcaaccgcacgtgacggatttagcacaaatctacttccgctttaacagtagttgttactttattttggcaatcttatttgccattcgctacaccttgcaaggtttggggcagagctttattccaaccttagcggggattgcggagttgttcatgcggatttttgccgggatcttcctcgtgcagcaattcggcttcatgggcgcaagtttagccaacccactcgcttggattggttcatgtttggtgctattgagttcctatttcaagacaatgcaccaactgaagcgtcgtgaagcaggtaagaatagggaggaacaggatgtttaaaaagtatttattggtcggcttatcgttgaccatgttggcgttgggtggctgtcaggcgacacaatctagtcaaccaacgcacgagaatgcaccaacaattgcaaataaaaaacaagttaaaaaaacaacggcaatcttggctgagaagacctttaagtcaggcgacaatgcctatttagaagtgaaccataataaatcaacgttggatgtccgtcaatggcaaaccgaacggatcaagtatggtgcgttggatggtttaaatcggacaacgactaatacggctttcttatcgaaagagacgttaggccgttcaaacacacgccatcgtcaaacgtggcaaccaaccggctggcataatcaacccgtgatgattgatggccaacgggtctttcctgaaagtcgcggccatttgattgcatacgcgatttcgtttaatttcaaccgagatggtgttttccaaaaaggggaactcggcagtagcaataatccgaagaacttagcgacacaaacggtcttcagcaatcaacgtaccatgcagatttttgaagaccaggttcgccaagcactaacgcaaaataaaaaggtgatttaccaagtgacaactgtgttccgtggagatgaattgatgccccgcggttactgggttcaagcaatctcaacagataagaagttgaactttaatgcgtatgtttggaatgtacaacctaagatgcaatttgactatgcaaccggtcgcggccattacgatggatcgatggcggtggtggatcagtatgcaggcaatccttatcagaattaagtagaaccaaaaaaagcgccgtctcaagattaattgagacggcgctttttttgcttaatgcacaattactacttacttagaaactaaccgttttaaacgtactttaaacatgcttcgatagccataaccttccggttcactacacaacaaaaatcatggccggaaaccaccataattcctggtgataggctaatcttcaagtgataaacggctatctcagcactttatggcaggtcattgcctgctgccaagtataggtcgtaccattctcttctggtgagggtgactttgtctgcttcgcagatttgtgctaggcggccggggttcattgtgccgacaacgacttgcatgctggctggaattctgaggagccatgcgctagcaattgcgttgacgttggtgtcatgtgccttggcaactgattggagtgctgcgtttaattctggaaatttcggattatcgatgaagaccccttcaaacatgccgtattgataaggactccatgcttgaatggtcatattcgtgaggcgtgagtattctaataaaccaccatcgtgatgaatgctgcgcgcgtcttgcatattggtatgcacgccggcatcaatcataccagtgtgcatcaaactgaattggagttgattagcaatcaatgcttgcggcactgcttgttggagtaagtcgacttgaccgggattgaagttgctgaccccgaattggcggactttaccactattttgcaattttaagaaggcttcagcgatttcatccggttccatgagtggatcaggtcggtggagcagtaaggtgtcaacatgatcaagttgtaatcggttgaggctggcttcaacaccttcgatgatgtgttcctttgaaaagtcgtacatttttttgccaatgccgactttggtttgaacgagcacttgatcacggtcaatatgactggccttaagggcgttcccgaatttaatttcggaagcaccatcgccgtaaatatcagcgttatcaaagtaattaatcccatgttcataggcggtttcgagcattgtcagggcttcttggtcgctcagttgtgggatgcgcatgacaccccagacaattggcgaagccattaagccgctgccaccaacattgattttttgcactatcaatcactccttttatttgatgcttttaacctaccacaaagtaccattaatgaaaagaaaaggctttcctgaatttcaggtcgtcactggcgacaattttcggtatactaatcacaatagacaggagacagttagatgacagataagaaagcacaggcaccgcggctaaatccacaacttgagacggtacagcttactgcgtttgaaccagatgagacttatgaaggtttgtttttcgaagaactaacgttgaagcaaaccgaagttgagatgttattctttaaaggctgtttatttaaaaattgtcagtttgaacaagtcgactttaataactgtgattttcaagatgtgcaattcgaacactgcgcgttgttaaactgttcgttgacgaatgatcccttccaacgagtcgcgtttaatggttgccagttgattggttccgattttgcagaggctggtctgaatgatgtcacgttcgacacttgccaagcggattacaccggctttaactttgcgcggatgcggcatgtcgactttaaagattgcagtatgcaagaagtctcactcgggcaagttgattggcagtggctaacaatggtcgggaatcgtttgaacggcatggatatgactggcacgaatttgaagaatctcgatatcagtcagaatcaattcgaaaaagcgactttcacgctcgaattattacgtggggcgaccatcagcacagaacagacgctcgtgattatgagcgcgttgcgaattaacgtccgctagcttgccggtttttaaaggcaattatcagacaactgattgttgcgatgagcatcacaagcacagcgaagaaatcttggtgcaacagctggcagaggccgctgatacataaagcgatgaataaaataagtgggattttaaggttggctttcattggtcattcccccgtactttaatctgaaaaggcagcgacaaaatattgtggctgccttttcgtttgatttttaataattaatcttgtatgtcaattcaacaaaatgaccgatttgacggctattgataagttccaatggcatatcggttaagtgcgtgctgaccagtgaaatgccgtcacccaggagaactggcgcaatggtgatgatgagttcatcgactaactgggctttaagcaattcggtaaagatttctgcaccacccacaagccagatattgccgccatcttctttttttaattgacgcatgaactcaggaatattcccagcaacgacatgtgttcgatcttctgtatcatgtaacgttttcgagaagacatagccgtttttatcttggtaaggataggtgccggctaatttaagactttgttcatatgtcttacgccccatcacaacggtatcgacggtgcgttggaaagcttgaattgcagcgtctgattcggatgaatcgagtgcagctaaccaagcagtactaccatctttttcagcgatgaagccatctagactctgagcaaggtataaaattacttttcgcgaatttggttctgtcatagtcaacacgtcctttaaattaagattacctttattataacagttttaaccgctttcatacattctaaaccgttggtaatttaactggatttggcttatcatgaaaagcaaagctgtttactcaaaggagaccaaaaatgacaactactgaattttctccagaaatccaaagtttaattgaccaagttcaaaagaattatcctcaacccattaagatccgggtcgcagacgcagcgtctgggatgttaaaacatgatcaggcacaacgcgttttaaataacgatggcagcttggcaatcttaattaccgatgcgacagcggccgattatgctttatcacatgaattattacacttactgttattatcaatcggttttccacaaatcatgaccgatgtcaccacgcaggatgcgcaactcgatgaacaattggttgcgaccggcacaacgttgtacaatgctgctgtgcatatggtgattcaaaaagaacaagaatcccatggctttgtggatgttgaaactaaacaagcctaccttgaaggtctacgagataatctgaccccggaaaaagacgatcccgaaaatagatgggtgattttccgcgtattaacgctgttagatgccctcgtcttctttgatggtggcaaccaacaactgttaaaacagtggacggctgattatccaattgcgtttgcccaagccgaaattctctatcatgtgttggtacgcaaaacaattgattcaccattcacgttacggcgggctgtgattaacttgtgggttgcgtttgatcgcgtgttatcaaccctaggatttgctgaaacgaacctccaacaactcttgacattgacgccggtattaagtgaacggcaactacgattagaagtgcgccaagtctacgatattttacattccgaaaatctatttgcgaccgcaacgaaccaaaaagcgtatgttggaattggtaagagtgatcaacaaaatgcttttgtcttagggattccagaagacaaggcaacaccggaatatttcaaacgattgtatgatttatcagtgcaaaccttcttagatgaaattggaatgccgtattcattaagaaaatgagtgcgttcaagctggtcaacttttgagcattagcacagggaagcgaattagcgacgcagtcgatgatttgattcacagtgctaagcacagaaagttagcttgaaaagcacgttaaagaacagagtgcgttaattcgcggttagcttttgagcacttgcctaatcagacggataagcgccaaaggcgattggccgaccgatgtagcaaagcgcagaaagctgcgaattaaaagcacgttaaaaaggagtgatggtgatgacttttaaatcaatgttgcatgcggcacagcatgttgttttcttgacgggtgcgggcgtgtcaacggcttctggcattccagattatcgatcgaaaacggggttgtatcatcagcaagccaatccagaatatttattaagtcacacgaatttaatcaccaatccagccagtttttatgaatttgtcacgcagcagatgtattttcctgaagcaaaccccaatgtcattcaccaagtgatggcgacgattgcgaatcaaaaggggcagattatcacccaaaatgttgatgggttgcacacaaaagcaggcgcgcgggatgtgattgaatttcatggtagtttataccgtgtcagctgccaaaagtgtagccaagcagtgccttatcaggcctatttaaaggatatgcatcatcaagattgtggtgggattttgcgaccaaatatcgttttatatgaagaaccgattgatccgacggtgattgaacggtcgattcaggcgattgaagcggcggatttaattgtcgtggtcgggacgtcatttcgtgtgtacccatttgcaagtttaattgaatatcgccgtccagatgcccaattagtagcgattaatcaagaggcattacaatttgaaatgccagtcactatgatacaagcggatgcgacaaccgtttttgccgcactagcaactaaggagtgagcccatgttaactgaacactatcaaaaaattgatgcaattgatgcccaattggcggttttatttgaagaacgcatgcaagtcaccaagcaaattgcgacaatcaagcatgaacaaaaaatcggcttgacggacatccaacgcgaaaaagcggtgatggatgcgcgccttgctgcggttaaagatccagcactcgcagattacgtaagggatttataccaaacgttaattttaatttcgaaacaatatcaagtaaaattgatgaaggcgatgaaagaagcagaagaaaaataatgtggaaagagcgaaacggagacggagcgctcttttttgatggaaacgtgccgattcgaactgccttttccggttaacctaaaaatggcaatcatggctgaagagcgccataatccccatttttttgttaatcctcaaagccaacccgttcgactcagacactctaaacgtgccgagtctgctatatctttccggttagctacgtatcgcaaacgatcgacttcgtcgctcattcacgatgcgctgctaatcctcaagatataaccggcagattcagcactctgatttgaaacgtgccgattcgaactgccttttccggttaacctaaaaagggaaatcatggctgaagggcgccataatccctattttttgttaatcctcaaagccaacccgtttgactcagacactctaaacgtgcttcctgtcgcagtaatttccgcttaatctaaaaatggtattaatcctaaacccctggattaataccatttttgaattaatgctcaattgctaaccgcgacagtcagcactcttttgcttaatatgctaaaatgaaactaatttatgagatgtgaggctattgaactgtgactaaacgacgctataatttagcggtaattcgctatcgcgggactttactattattgaatcggattaagcccccatttgctgggctttggaatggcattggtggcaaaacagaacccgatgagacgccaatcagtggtatgcaacgggagttatttgaagaaacgggtttacaaaccaaccaatacacactccaaaatgcggggtggattgattggcacatcgacggtgaaacgattgcaccgattgacatttttttagtcgatattttaccaacggtgcaactaccactttatccggtcggaatgcgcgaaggcgtgcttcaattatttgaaccagaatgggcacaagctgctgataatcaaggaattgtggcagacttacaggccattttaccaactgttttaagcggtcagctcaatcggtatgacacggattttcatgcagatcagatgattttctttgaagcaattcccattactgaaccaagagaaggagaggaagcactatgatgacaaaggaccaaacgatgatggtcttgatggttttaaagaagaagttgcaagggattcgtttttttagagtcgtcgaagaactgttctcgttatacattatttttaaattcttaactgcaacgggccaggtacagcttttaggggtggcgttttctgaggggcgcgccattagcttaatgttactgctgctagtcatcgactttagcctatcgcggattcggttaaattataaacgcatgggacaacaattaattgtcacattgaaggatttaacggaacaagaagctttgttcattcaacaattccaacggttctagaggtgtggatatgataacaattggattaactacttggtcagaacatcagtcattaatgcccagcaaaaagcagttaacattaaacgactacgcgcaatttctgccagtggtggaggtcgatagtttttattacggcttacgcgcaccaaccgtcagcgcgaactggttgacgcaagtaccagccagttttcagttcattgttaaagcacaccaagcaatgacccgccaagaagactacgccgagtttacgagtactgaaaaagaattgtttgtgcggtatcgccaatcaattgaaccgctaattaaggccggccaattacaggcggtcttatttcagtttccgccattttttcaactgaatcaggaaaatagtcaatatttacgacaaattcgcgcgtggttaccggatgtgccaattgctgtcgaattccggcatcaatcctggtacgatgacgcttttaagcaacagatgtacgcctttttgaagcagctaaacatgacacacgtcatcacagacgaagcacaaacaccgacgaacagtgtgccgtttgaaccggttgtcaccaatccggcgtttgcgatgttgcgcctgcatggtcgtaatatggccgggtggcagaatccgggtgcccaatggcggaagcaacgaacattgtatcgctatgatcaagatgaattacaattttttgcggatgctgtgcggcagattaaaaatcaagcggaacaagttgccgtgatttttaacaataattctggtggggatgctgcggataatgctttgcaattacaacaattacttgggctagaatttcctgatttagccccgaaagcgcctgaacagattgatttattttaatgaaggcttagtgtgagttgtcgtttaaatgactgctcttttgtgctatactttgattacttatatggcattatttaagcaagtcgagaattgttaagattctcgtttttttaattaaggagcgaacctaatggcagagacaaaaccaacattttacgtaacgaccccaatctattatccatctggtaaattaacgattggtaactcatatacaacaatcgccgccgatgtcatcgcgcgttataaacgcttgatgggctttgatgtcttcttcttgacggggacggacgaacacggcttgaaactcgaacaaaaagcagctgaaaagcatttagccccacaagaatatgttgatggcatggctaaagacatcaaggcattatggcaaactcttgaaatttcaaatgacaaatttattcggacaacggatgaataccatgtcaaagcggttcaaaaaatcttcgacaagttattagcgcaaggcgatatctatcttggtaaatacgaaggttggtattctgtttctgatgaagaatacttcactgaatcacaattagcagaagtttataaagacgacgatggcaatgtgatcggtgggaaagccccatctggtcatgaagttcaacgggtcgctgaagaaacttacaagtttaagatgagcaagtatgctgatcgcttattggcttattatgaagaacacccagatttcatcgaaccggcgtcacggcgtaatgaaatgatcaataacttcatcaaacctggtttggaagacttatcggtttctcgaatctcatttgactggggaattcacgtttcaagtaatccgaagcacgtggtttacgtgtggttagatgcgttatcaaactatatcacagcgcttgggtacggttcagacaacgacgaattgtttaataaatactggcctgctgatgtgcatctagttgggaaagaaatcgtacgattccatacgatttattggccaatcttcttgatggctctagacttgccattaccaaaacaaatttttggtcatggttggttgttgatgaaagacggtaaaatgtctaaatcaaaaggcaacgtagtttatcctgaaatgttagtggaacgttatggtctagatgctttacgttactatttaatgcgcgcgattccatttggtaatgatgggacatttacaccggaagactttgtcagccggattaactacgatcttgccaacgatttaggcaacttattgaaccggaccgttgcaatgattaacaagtatgataatggggcagtgccagcgtatcaagctgacgtgacaccatttgatgcagacttacaaaagacagctacagaaacaatcgaacaatataccagcttaatggatcaattgaagttctctgatgccttagataccgtttggcaattaatcagccgggcgaataagtacatcgatgaaacagaaccatgggtcttggcaaaagatgacagccgcaaagcggaactcgatagtgtcttagcccacttggctgagagtttacggattgttgcgctcttattacaacctgtgatgacgcatgcaccacgcgatatgtttgcacaattagggcttgatttcgatcaagttgcgcaacgtgaattggtttatgggacattcccagccaatattcaagtggttgctaaagggaccccaatcttcccacgtttagacttggatgaagaagtcgcatatattaaggatcaaatgggtcaagcgcaaaaagcgggcttagtgaacgaaaaagtgaaggctaagcaacaagcagctgaagccaaagctgaattcgatccaaaagcaacaacattagtcagtgaaaaggacgccatcaagtttgaagagttcgatcaaaccgaaattcgcgttgctgaaattaaggcagttgccaaggttgaaggcgctgataaactattgaaattccgtctagatgctggggatcaaggtgatcgccaaatcgtttccggcattgctgaattctatccagactatgaagcattagtcggtaagaaagtcttagccgtcacgaacttgaaaccacgtaaattgcgtggcgaattgagccaagggatgttgttatcagcagaacatgacggacaagttgaattagcagttgtgccaaacaacttggtgaacggctcacaaatcggttaatttaaaataacagaaacgtcaaaagggctaaaaggcatttacattctgtaggccttttagcctttttaatggaaaagagtgtgttgccagtggttagcttttgagcatttgtctaacttggcgaattggcgatggaatcgccggtttgaaagtgtaacaaagcgcagaaagctactggcaagagcacgttttaactgtcagaatgaggacactaaaaggagattgaaatgcaaatttttgattcacatacgcatttgaatgataccccatatgcagggcaagaagctgattttatcgcgcaagccgctgaactcggtgttgttgaaatggcgattgttggttcagatacagtattaaatgagggcgctttgcgcttagcagcgcaatatgaacctttatcagccattatcggttggcaccctgaatcagccaaagattatcacaaggcagaagaaaccgtgctgattgaccaattacaacgaccagaagtagtggcgctaggtgaaattggtttggattatcattgggatacttcgccacgcgatgtgcaacaaaccgtttttgcacggcaaatcgagattgctaaatccttgcatataccaatttcagtgcacacgcgggacgcgttagaagatacgtacaagattctaaaagaaacagatgtccgtgattgtggggggattatccacagttttaatggtgatgttgaatggatgaaacggtttatggatcttggcatgcagatttcgttcagcggtgtggtcagttttaaaaatgcgcatgaagtccatgaagcagctaaagcatgtccattggacgtgatgttggttgaaacggacgcaccttatttaacgccgacgccttatcgtggtaagcagaatcaaccaggctacacacggtatgtggtagaagcgattgctaaactcaaagatgtggcaccagaagaaattgcggcagcgacgtatgcgaatgcccaccggatttttaagttaggagcactatgaaaaaaacaattcaagaagtgattgttgttgaagggcgcgacgatacgaagcggttacgggaagttttcccagatgtttcgacaatcgaaacgcgcggttcagcaatcaatgaagaaattatcgaaaaaattgcgctcgctcaagaaaaacgcggggtcattgtctttaccgatcccgattttcatggcgagaagattcgtaaaatcatctctcaaaatgtaccgggcgtcgaacacgcctttttaccacggacagaagcacgtccggaaaaagcaggcggcagtttaggcattgaacacgcaaaaccagcggcgattgtccaagcacttgagcatctattaacacaagatgaagaagcagacgaacaaatcagtcaatcggatttattaacggcgggcttgattgcgggggctgattcaaagcgacggcgcgaattactcggcgaaattttgcacattggttacaccaacagcaaacaactttacaagcgtctcaagatgttccaagtgacgcaagctgaatttggcgctgtactattacaaattaaacaggaattaggagattaatatggaagatattgcaaatcccgagcgtacccggaaaattctcaaacgttacggctttaagtttaaaaagagcttaggccaaaacttcttaaccaacatcgccattttgaaacaaattgttgaagctggtgatatcaccaaagatgacgatgtgattgaaatcggccccgggatcggttctttaacggaacaaattgccagaaaagcgcatcaagtattaagttttgaaattgatgaacggttaatgccggtcttaaaagatactttgaatcactaccataacgtcacgattttaaaccaagatattcttgaagcggatttaaaaacgattatcgccgaacaatttgatggtaagcataatctcaaaatcgttgcgaacttaccctactacatcacaacgccgattatgctgcacttactagaagcaggcttgccaattgatcgcatggtcttaatgatgcaaaaggaagtggcagaacgaatcaacgctgaaccaggttcaaaggcttacggctcattaagtatcgccgttcaacttcattcagaagtgaacttagcctttattgtgcccaagacagcctttatgccacaaccgaatgttgattcagcgattgttgaattagtggggcgcaaagcaccacttgtaacggttgataatcaaaccttatttgatcaattggttcgtggcgcatttgcacaacgccgaaagacattatggaataacttgcaaaatcaatttggtaaacaagatgaagtcaaagcagctttaacaacagccttagaagcagtcgagattgcaccgagcgctcgtgctgaacaattgagtatccaacaatttgcccaattaagcgatgcgctgaataatcagccaatttttgctaaaaaagctaagtaagtaattgccaaatcgttggtacaatggtataattgcaaatttttcgtttatatggtatactatccctcgaagaggtgaagcataatgccaaccacacttgccaatattaagaacggtctcgatgggcatatcggagacaagttaatggttgtcgctcaagctgggcgcaaaaaagttacaaagcgaaagggaattcttaaagaaacctttccagcagtatttgtagtcgatttagatcaggatgaaaatgcttttgaacgtgtttcatacagctatgctgatttgttaacgaaatcgattgagattgagtttgatgaagaaccaattgtcctatagtttaaaatagaagaatagagtagcactcaaccaacgggttgagtgcttttttttgttcaaaaggcagattgacgaatcgccatatacttcacgtggttgattagatgttgacattcgtttgataaaacaatatcatatagaatgtttatgacgtatacaaaagggagaaagaatatgtttggcaattggagagagaataaagtgaagttaggtgggttcattattatgatctgcttaattccgattttactattactaatcacatttaattttattaagtacgaacagaccactaatattaaacatatgaaagtcgcggttgtgaatcaagatcaatccgcaacatttaaagggaaaaaggtggcagttgggcaacaggtactaaaaacgttgcgcaatgatcaccgggtcgattggcaatttgtcagtgctaaggatgcaaaagcgaacttagctagcggtcgatacgcgatgcaggttgtcttaccgaaagacttttctaaaaatgcgacaaccgcgttagataagtcacctaaagtcagcttgttaaaagttgaaacgtctaagaaaaataactacatggccggcatgattacaacccaagtcgtgaaccaaatgaagggcagtgtcgttcaaaaaattcaagaagcttataatcaagccttgcttggtgcaatcggcacgctaggcagtggcgtacaagaagctagcaatggcgttaaaaagttaaacacagcagccggtcaattatcaaatgggagccaacaaatctatgataatttaaatgtgttgcatagtgggacacaacaattggcagatggtagtgcgccattggcaagtggcgtgcaacaattaacaactggtgctgggcaactttcggctgggcttggagattatacagctggcgccggtcaaattaatgccggtttaaaccaactagcagccaataaccaaacaattttagctggtggccaacaaatcagtggcggtgtcgaccaattagctgatggcactaagcagttgagtgcaaaactaactgaagcagccgatggaattgaatccagtttagatggtaatcaagaccaattaacacaattgaaagctggtttaggcgctttaaatgctggtattcaagagttagatcaaaaagttaaccattccaataatgataattccgaaattatcaaagcagacttattaaagattgcggataatacaaaaaatacaggggcacttttacaggatagtggtgcgaatttaagtcagattaacgataaagtgtacaatactgctaaacctgatagtgttgcaaacagtttacaagatgcaggaaatcaactaaaagccttacaagatttagcggtaactaacggtaagtttgcaaagtttttaattcagaatccaactattttgaaagcgttgctggatattggagatgcagcaaaagcagacttgctgaatgctggcagtcagttagagtcttctggcacgaacatgaaggctattcaagccaacttaggcacgatgggcagcaacatgagtgatactggtgttcaactacaggctgtttcagatgaattaacaaaaacggctgataacatggcacaactaaaagccggaatcgcgaagatggcaagccaagaccaagcgccgttagcactaaatggtgctactcaggcgattgatacactgacagcggggttagccaaagtcgacactgggttgaaacaaaaaggaaatacgaccgatacaatgggcggaattcaagctgctgacatgattcatgccggcttggttcagattcaagatggtctaaaagggaaagctggtcaacttggtttaatgtcaggcttaacgacttatctgaatggtgtttcgactgcagctgcggggagcaatcaattagtcgcgaataacaacaagcttaatgccggcggacaacagctaacaaatggtctacaagaattaaaccaaaaagcaccaacgcttgtttctggcattacacaaattaacgagggttcaggcttattggcagatggtgctggacaattaacgactggcttaggccaagcgggtgctgggattagcttattaaacgtcaagttaatcgatggtagcaagcaagttgccaatctttcaacaggttccgcaaatgtagaacatttcgtgcaaccagtcaaagatcaattactatcagatacaaatcatggcgcattaattaataccttctcgccattagtcttaacacttgtcttctttgttggggcaatgttgacgcaattaacactttatcgctatggtgaaacattggcacatagcggtcttaagcaacggatgttggttgtagctggcgtagttgtcgcacaagccttattaattgatatctttgcaaacctttttggattgacgattgcacaaccgttcgcattcttcgtcttaagtatgatgacgagtgcggtctttacccttgcatgtttagcattggataaactttttggaacgatgggaattttaatggccttcgggttattgttcttacaactcatcattacagggggactcttcccgaatgacatgctttcaggcttctatcgtggtgtggcaatcttcttgccagggacttacacgattagtgggttcgaacaagttgtcaacggcaatggttcacaactttggttagtcttaatcgtcttggtgatcttttgtgcagtgttcttcgccggtttgttcggcggagagttaaaacaaaagttaacgcaaacaccaaatagtcaagcttaaagatttgtggtacagttaagaaaataaataaaaaggtgggaaatattgtgaaagatagtcaattgttggatgaatacgttgaactttacatgtcggcgattaaatatgtcgaagacttggtttctgaaccaacgcaagcttaccaattgtcttttgaacaatatctgattatgaaagagattgctgatgataattcagtgagtctaattgatattgctaaaaaacgaggcgtaacacgcggtgcaatttctcgacagattcgtgttttacttaaattagactatattacacaagaaattgatcccgatgatcggcgccggttgattttaaatttaacgccgtctggtcaaaaaacagttgaagaattaaatccgaagatccataatcggtttgcctcgtggatggagacgtttggtaaggaaaatgccaagcagatgcttgatttaatgaatgaatttagacataagattatggtaaaagataatcaataatatcgactgaagagcactgacagatgattgtcagtgcttttttggatgcattgttaaaaggttggtttttacaagcagatatgagtataatgaaacaattaaatgctaggtaaaaggtgaatgtgatgcaacgaattgaaaaagcacctgctaaaatcaatctcagtttagatgcactctttctacatgacgatggggaacccgagtggcagatggtgatgacgtcgattgatttggcagactatgttcagataacattacgcgatgatcccgcaattgaggtccgcacatcaagtggctttttgccagaagaccagcgtaacctggcctacaaagcagctcaattattacaacacacctatcagattccaaccggtgctttaattgaaattgataagcatattccagttgcggctggcttaggcggcggaagttctgatgcagccgctgttttacgggggttaaacgaactatggcaacttggtttaacgcgcgaacaattggcgcgattagggctacaaattgattcggatgtgccatattgcgtatatggagaaaccgcccttgtcactggcaaaggcgatcagatcaaaccactcggatcattaccgaatttttgggtcgttgtcgtgaaaccggaagtcagtgtttcgacgccgcggattattcgtgcattggattgcgaccagattcaacagcatccacaaactgaggcgctggttgcagccgttgaagctggagatttaaatgcaatgactcgcaatatggggaatgttttagcaccgattacgactgaacgttatccagttatcaagcaattaagtgagcggttattgcagtttggtgcggatgttgctcagatgagtggtagtggtccaacggtatttggtatctgtagtcagtattcacgggctcaacggatttataatagtatgtccggattttgcgctgaggtatatctggttaaaccattgaaaccataataaaacgccgacaatcaaatggttgaggcgtttttaattggcgtaggaatcgctttaatgggataaaagcgaacaattaagctctttttttaaaaaagactaggatttaaccgaagatttctatataattgattggtagacagtttttttcggaaataacagtaaagtaatatatagaggggtattcaacatgaaagttagaagaagcgatcgattaatcgatatgacacgctatttattagaaagaccacatacgttgattccattgacattcttttcaaaccgttacgaatcagctaagtcatcaatcagtgaagatttatcaattgtgaagcggaccttttttaatcgtggcacagggatcttagaaacggttccgggcgctgctggtggtgtgcgctacatgccaatgattaaacaagatgaagcagaagcttttatcgctgagatggcacaacggctttcagaaaatgatcgcttattacctggtggttacgtctatttatcagacttacttggacgtccagaagtattacggcaagttgggcgtttaatcgccaaccaatatgtgggtaaagaagtgacggctgttatgaccgttgcaacaaagggaattccaatcgcacagagcgttgcgatgtacttaaatgtgccatttgtaattgtgcgccgtgattcaaaaattactgaaggttcaacggtcagtgtgaactatgtttctggttcatcagctcgcatcgaaaagatggaactttcaaagcgcagcttacctgaaaattccaaagtcttaattgtcgatgatttcatgaaaggcggcggcaccgtcaatgggatgaagagcttgattgaagagtttgattctgaaatggttggcatttctgtctttgctgaatcagatttcgaaggcaatcggatggttgatgattacacatcaatcttgaaggttgataaagttgatattgaaaataaaacgttaagtgtcagttatggtaattacttaacaaagaatgcagatcgcttagcttaaacgatttgatagcacccggacaggttaattgtgcgggtgctttttttatttgaagtgctttcggacagtttccaagctttgtccgttgcataaatgacagcggtaacatagactgaagttatatttaagaggaggttactatgaaaaaaataatgaatgatccaagccaaattgtaacggagatggtccaaggtttagtgcggagttatccagaccaactcaaacaaattccaggaacagaagcagtgatgaaaatcgccgatttaaaacatcggccacaagtcgggattgtcagtgggggcggtagtggtcatgaaccaacgcacgctggttttgtcggcgatggcatgttgacggccgctgtgtgcgggcaagtctttacatcaccaacacctgatcaaatttatgaagcaattaaagcagctgacgcgggccgtggtgtgttcttagtcattaagaattattcaggcgatgtgatgaattttgaaatggcgaaggatatggcggctatggatgatattgatgtccgctcaatcgttgttgatgacgacattgctgttgaaaatagtacgtatacgcaaggacgccgtggtgttgcggggacaatcttcgtccacaagattctgggtgcttatgcccgtcaaggtgctggtatcgaagcaattgaagaattagcgcaccaaattacaccgaatattaagacaatcggggttgccttatctggcgcaaccgttcctgaggtcggaaaaccggggtttgaattagcgcctgatgagattgaatatggtgtagggattcacggtgaaccaggttatcgccgtgaaaaattacaagattcgaaacacctagcaactgaactagtcggcaagttaaaagaagcccatcacatgacggccggcgaacattttgcggtaatggtaaatggcttaggtgcaacaccactgatggaacaatatgtctttatgaatgatgtcttggacctcttggccgctgaaaatgttgaagtcgacttcacaaaagtcggcaattatatgacctctttagatatggccggtgtgtcattaacaattatgaaattaattgaacctggttggattgctaaattagatgaaccagtcacaacgattggttggtaaaggagagataccatgttaacagttgaaaatacattgaaatggcttgaattgtttgatgcaaaaatccaagctgaaaaagattatctaagtgaacttgatacaccgattggtgatggtgatcatggtaataacatgtcgcggggcttgttagctgtgcatgaagcattgaccaagcaacagccaaccgatgtacaaggtattttgaaaacgactgcgatgatgctcatcagcaaagttggtggggcttctggtccactctatgggacagcctttttagaaatggcaaaactaagcagtacgacacttgaagtcggcccattattggcagccggtttagaaggaattcaaaaacgcgggcatgcacaagttggtgaaaagacgttgattgacgtttgggctcccgttgtcaaagcggttgaagatggtactttagatgtggctgcaattgaagctgccgtcgaatcgaccaaagatatgcaagcaaccaaaggtcgggcatcttatgtcggtgaacgctcaatcggacatgttgatccaggggcggcttctagtgggtatttatttactacaatgttaatggcgggggtattatcatgagtgaatatggtgttgtgattgtttctcacgtaccagaaattgcggccggtgtagcgcgtttaattaaagaagttgccgctgatgtttcagtaacgactgctggtggcacggacgaaggtggtattgggactagcgcaatgaagattcaaagtgcttttgaagccaatgccgggcaagaattgttagccttctacgacttagggagcgctaagatgaacctcgaattggcccaagaactaacggataaaacggtgcatctatacgatgttgctttaatcgaaggttgctatacggcagcggcattgttgcaagcagggacggatttagctgcaattgaagcccaattagcaccgttgaagattaaataagaagtaaaaactgcttaaaatgatgtctgttttggagactgagtttaagcagttttttatatagaataatattcaaaagaaaagatgatttttaataatgtaactagtaataactttaaaatattgttgaggacggtaatgtgattttaaaatacggtaagctatgtattaaatagatattgctgttatatttaaataaattaagaatgaatactatgattaacatattattaggaggattcaggttgaaaaatattattgttactggtggggccggctttatcggttctaacttcgtgcactatgtggtcaataaccacccagaagttcacgtgacggttttagataaattaacttacgctgggaaccgtgcgaacttggccggtttacccgcagaccgtgtggaattagttgttggtgatatctgtgacgctgaattagtcgataagttagttcaaaagacagacgcagtggtacactatgctgccgaaagtcacaatgataactctttgaaagatccttcaccttttattcaaacgaacatcatcggttcatatacgttgatcgaagcttgtcggaagtataatgtgcgttatcatcacgtttcaaccgatgaagtatacggtgatttaccattgcgtgaagacttaccaggacacggcgaaggcgttggtgaaaaattcacgcctgaaacgcgctataacccaagcagtccttactcatcatcaaaggcgagctcagacttgttagtgcgtgcttgggtccgttcattcggcttacaagctacaatctcaaactgctcaaacaactacggaccttaccaacacattgaaaaatttattcctcgtcaaattactaatattttaagtggtattcgaccaaaactctacggttcaggtcaaaatgtgcgtgattggattcatacgaatgatcattcaagtgccatttgggcaattttaaccaaaggcaaaatcggtgaaacttatttaatcggtgccgacggcgaacaaaataacaaagatgttttggaattaatcttagaattaatggggcaacccaaagatgcttacgatcaggtgaaagaccgtcctggtcatgacttgcgttacgcgattgattcaacaaaattacgggaagaattaggttggcaaccagaattcactgacttcaagtcaggcttacaacataccatcgactggtatcgtgacaatgaagactggtggcaagcagaaaaagcagctgtggaagccaactacgctaagaatggtcaataaatatgaaattaaattttgatgggattatcttataattaccgttgttcatataagtgtcctgtccgtaataataaaccgttaattgtatcagttaatgtcatttttagggcagtgattacttttgaaactgattggggatgacgactgcggagccattcagcggtgtaagcaactaatgcgttggaaagaaaactaagtaaaaaggcttggtagtcggtggataacgtaatgtgatgggcgctagcaagatcttgaataatccgattaatcagttgatggacgtgatgaataaaatggcgttcgaaggcgttttgcccttcaatcgacaaagcattttgatagaaggcgcggttagcatcgaagtagttaaatagttgcgccaacacctgtgtccaatgaatatagctgagatgctcgtcgatgtagacaccgatttcttgatcgtaaatccaatctaataacgcatatttatcagggaaataatcataaaaggtttggcgtcgaatgccagttttattcatgatggtggtgacgctaattttattaaaaggttgttcaaccattaattgtttaaaagccgtggcaatcgtttgttgggttgtctgagtcatcagggcatctccttttgaacgttattaagtaaaaagtcgtcattcaagttagtgaatgacgacttttgtattatatggaattgcggtatagaaccattgggcatcagctactgataaacggatacagccgtgtgaattagcttttttgcctaattgctctgcttcttctggaatgaaattgccagcttcatctgtgggcacactgtgaaaaagataaataccatgatctaggaaagagcgccagtatttggcaccttccccggaatttgcattgaaaaatgagtcgccgtgttcagcttcgatatagaaggtaccagttggtgtgggtgactcaggggaaccggtcgaagcatgcattgtgtacaaaagatcattgccatttttaaggtagacacgttgctgtgcaattgaaacgtcgacccataaatcgggttgttcgtctaaattaggatatggtgtgttttcggaaggcgcacgccagtcaattggtgtcgggtgagccgctttttttgattttatcgattgttgcctcgcatgcgattgtgatttggtagaggacgtgactgcggcttggtgtgtttgatgccgagctgaggtagaccaatacccaccaattagtaaggcaatggcaacaatgatgctgccgagcattaatcgaatgttgtttgtcagttttggcatggccgacttccttccgcaataaagtacctccagtatacgggataaagcgctaaacttcaatacggattagcttgctctagcctagtatttaagctaaaatagaccagtaatcacgaatgacgaggagcttatgatggttaataaaaatgcaattattttagcagcgggtaaaggtactcgcatgaagtcaaaattatataaagtattacatgaggtttgtggtcgaccaatggtagatcatgttttaacccaagttgaaagaacgcacccaaccaatgtggtcacaattgttgggcacggcgctgaaaaggtgaaagattatctcggcgaccggtcacaatatgcattacaagctgaacaattagggactggccatgcggttttacaagctgaagctttactgaaagatgaagatggcattacgattgtggtcagtggcgatacgccacttttaaccgctgaaacctttgaaaaattatttgcataccatcatgataaaggcgcaaaggcaacgattttaacagcaacggccccagacccaacaggttacggccggattatccggaatgatatcgggattgtcgaaaaaatcgttgaacaaaaagatactaatgataaagaagcgactgttaatgaaattaatacgggcgtttattgctttgacaacaagaccttattccaagctttgcatgaagtgacgaataagaacgcacaaggtgaatactacttaacggatgtggttgaaatcttgaagaaaaaaggtgaaattgtcgctgcttacagaatgccaaactttgaagaatcaatgggtgttaatgatcgagttgctcttgctgcagcaacaaaagtgatgcgtaaacgcatcaatacagaacacatgcgtaatggtgtgacattaattgatccagaaaatacttatatcgaagtgggcgttcagattggtaatgatacaattgttgaacctaacgtcgtcttaaaagggaacacaacaattggttcagattgtttcgttggtgctggctcaactattattgattcaacaattgaagacaacattcaaatcacaagttcaacgattgaatcagctatcatgcacacggggtcaaacattgggcctaacagtcatttacgcccaaacgctgaaattggtgaagacgtccatgttgggaacttctgtgaagtgaagaatgctaaaattggcgatcgcacgaagattggccatttaagttatgttggcgatgccacattaggcactgatattaatgttggctgtggcgtagtctttgttaactatgatggcgtggctaaacaccacgcaaatgttggcagccatgtcttcatcggtagcaactcaaacattgtcgcaccggttgaaattgcagatcacaccttcattgcagctggctcaaccatcacggatgatgtcccagaaaaggcaatggccatcgcccgtgcccgtcaaacaaacaaagaaaactactgggcaaaactaccagtagcaaatgacgaagaatggcaatagagtgctggctgtggcggttagtaattgagcattaatacgatgttagattaagcggaaattacggtgacaagaagcacgttttggattaaagtgtgtttgtgacgattagcttagtgttgtaaagcacatcttaaaataaaaatcgtccgtaatcttatttttgagattacggacgatttttttgatacttgtagttattttaaagttgagaaataatcgcgtattaagaaggcgattagaaaagcgggccaaatccaaattgaaccacttgaaaataagattagaagaagtatgataagactcccaacagcggtggttgcccagcccatttttgtaatgcgataatttttaggattatagttcgggtgactggggtagaaaaaatgatactgataaatcaaaacggcaacgaatagaataagaccaagaataaaatagggcatgctgaggtgaaataagcgatcggaagtaataataattaccagaattaaaagatagagattattaaaaatagtgtatttaaggcgggtcatagtaaccgcctttttcaattagtgtaccttgtcttgcgctaaatgacaatttaatccataatccaaaataaacaagcatttttggggatataatgggatactaaacgggaggttcgatggtaatcgctattaactttttctttttctctcacgtttctaatgaacagcgcttactttacaacatttgtgaactttttaagttttaatcttgatttccggggtgaaaatgcctaaactttaaataggtactaacataaattttttggaggctgacatgtctgaacaatatttcgaccctaagttgaaaatctttgctttgaactctaataagcccttagctgagaaaatcgcggctgaagttggggttcctttaggaaaatcttctgttaaacgttttagtgatggtgaaatccagattaatattgaagaaagtattcgtggcgacgaaattttcattattcaatcaacatctgcaccagttaatgataacttgatggaaatcatgattatgattgatgcattgcgtcgtgcatctgctaaaacaatcaatgttgtgttaccttattacggttacgcacgtcaagatcgtaaggctcgctcacgtgaaccgattaccgctaaattagtggctaatatgttaacgatggcaggggctaaccgaattttagcattagacttacatgccgtacaaatccaagggttcttcgatattccagtggatcacttgatgggtgctcctttattggctgattatttcttgagcaatgacttggctgaaaatgctgttgttgtttcacccgatcacggtggggttacacgtgctcgtaaattagctgatttcttaaagacaccaatcgcaattatcgacaaacgtcgcccaagaccgaatgtttctgaagtgatgaatattatcgggaatgttaacggtaaacgcgcaatcatcattgatgatatgattgatactgccggcacaattacgttagctgcgcaagcattgaaagatgctggtgcaacagaagtattcgcatgttgtacacatccagtaatgtctggcccagctattcaacgaatcgaagattcagtgattaagcaaatgattgttacagattcaattaaccttccaaaagaaaaattaatcgataaaatggtacaagtttctgtcgggccacttattggggacgccatcaaacgaatccatgaaaacaaaccagtcagtccattatttgaaaacagatttaaaagataagcgtgctaactcgaatgggttagctttgagaaagcacatttcaataagctaacaattaaaaacgcctgaacaatttgttcaggcgttttttgtgactttatttttctttgttagctaataaatcgcgaatttcttttaagtaaacttcttctttcgtttcgactacttgtgcttcttcttcttcggtcttcttgcccatgtcacgaagcttgttgaatcctttgacgattaagaagacaacaaatgcgatgattaagaagttaatcacatcgtttaggaagttcccgattttgaaaacagccttggtgcctggaatggtaagcgcaataccggatagatcaacttgtccaacgaataatgaaatgattggattgattaagttctttgttaatgagtccacgatgctttttaaagcagcccccaaaataaccccgacagccatatctagcacattaccacgcataataaattctttaaattctttaatcatgaaaacgacctccattaatattattaattattgctacaaaaagtataccgtatttccagagcctataaaataaaaatgctgtgctagttacataattaaccaataaatttgttattttcatgaaaaatcgttaagatagtcacaggaattaaataacagaaattagagatagaggaaccttagatgaattggattgtacaattgtatcaaccattctttgaactgagtaattggcaaactgtcattacgtcgtccgaagattggcttttaattttaacgttagtgattatggaatgcttactctcagtagacaatgctgttgtattagcggcacagacacaaacattacctacaaaaattgagcaagaaaagtcattggtgtatggcttatggggcgcttatgttttccgcttcattattattggtgtcggcacctatttaattcatttgtgggaaattaaagttgccggttcattgtatttaatttacttagtcattgcttatttcagaaagagtgggcatccgaagcaggctaaaacaccggaggcgggttctaaaatcagtagtccgcatcggttctggcgcacagttgcttcgattgaattgatggacattgttttttcaattgattccgtattagcgtctttagcgatttctagtaatccggtgattgttttaatcgggggaatgattgggattatctgcatgcgggggattgcccaactcatcgcccaattgatgaagaaaattccggaattaaatccgatggcttacatcttaattctcttcatcgcgattaaattattcttgtcgattccagccattgactatgaaattcctaacctagtgtttgctgggattgtgtttggcgttattctactgacgctcattattcattatgtccgtgcagcacgggctaaataggcatcataaaaaagccgttgtggacaaattgtccacaacggctttttacgttacatatgattgagtaaaacagttaaggctgcaaatgcgacacttgcaattgcgactaaaatgaattgatgctgtttcattttgagaattgcaatgaattcacggatgattgcatttggtaagaagtaacgcgatgttttagcgccaatgccatctgctttcaaacgggcttgctttgcaaaaagcccagcgcggaatgtgtggtaattattggttgcaaaaataattttaggattcgttttagtggtatcagccatgataatgtcttttgaaaattgcatgttttgtaaagtgttgactgatttttcctcggtgagggtgtctttaatcggaatcccttgctcaatggcgtaacgttgcatggcaactgattcaggcagcttctcatccggaccttggccgccagaaaagaccagttttggtgcagggcggccttttttgacttgtttatcataaaatcgaatggcgcgattaatccgactggccagtaacggtgggacgaattgaccatcgattaaaccgctacccaagacgatgatgtaatcttgttgataacgggggcggttgaattgatagataatcagtgaagttagatataaatagaagaacaatggaatatacaaaagaaaaaccgatacaattatgctgacaaataatttaacatcggcgggaatgtgtaacaagcgcgtgatgattgggatgaaaaatgagccaatgatggctaacgcaatgaggagggtcagcatgttggataacgtgtgactttcttttttccagacaatatacgcgttccacagcaacaagacaataccgaataagtagaagaacatgacgattagaacgacaacaattgcagcagcaattgcaatgttattcagcgtttcgttattgaggcgaatcacaatgagcgcagcatccattaatgcgctgaagaggaaaaagttaaacacaatgccgttgattaattggcgtttttcaaatcgctgtaaaccaatgaataaaatcaaaaagaaaaggggtgacgcgtaaacgagatcaattaacgtagtcataataactccccttatgattaggcttggctttcaaaggcgtatgtttcaatggcgtatgccacgccatcttggccttcatggttactcttagtaacaaccttagcaatttttttcaattcaggaatggcattatccatggcaactgggaagccggcgtattctagcattgatagatcgttaccttgatcaccaatggccattacttcagattgatcaatatttaaggcatttgctaaatcgcgcaaaccatttcctttaccggcgttcttgttgagtacttcgagaaagtaggcttcactttgaacaaattgataacgatcgaaaaaatcagcaggaatcttggttttggcttcagctaagacggcgggttcgtcgattaacatcacttttgaaaaggccttgttaggtgtgatttcatcgacatggcggaaacgaataggcatgttgacgagggcactttcaccgactgtgtaagggctgatatcgcgattggcggtgtagatgaattgatcatcttcagcgtgtaaatgagaaccgatttggcgggagagggtttcaagttcaagatattggtcatgcgtaagagtgtgacgcactagaatttcaccagttgccgtattttgaaccaaagcaccgttgaacgtaatcacatagtcagtggcttcagttaaacccagttcttttagaaaaggcgtgaccccggtgagtggtcgcccagtacatagcacaactttaacgctatgttttttagcagctttgacaactttgattgttttagggctaaggatgttattttcatttaatagggtgccgtccatatcgacagcgacaagtttgattgacattataaaaactcctcgtaagatatatttataagccgttggcttacaataaaatttaattattactttgatactgcgggattcttcagaatataataggaccatggaatggatctatcgggaatttgctaaaaactcctgtagttaactctactttagtaagtccgttacccgagtctttacgctctctcccaactcactagctgttttcaatcaggcttatcttcaatgtagtagtttgaaggcggcataagtccaattggtcaaaattctgttacgcgaggttgtagctgtgtaaagattttctggggaatcccgcagtatcaaagcaagttccaaataactctcgaaaggaggtccttcctgtgaaattatttgttggtttagatattagttctgaaaagattgatgcttgttttatgaccgatgatagtaacttatcaatcctaaatcgtttaagtgttgctaacgatttaaatggtgcttctgaaattaaagccttaattttaaaacatcacgcagaagtatcatttgaacagattgtgattggtatggaatcaacatcactatatagttttcatccagctatgtttttccaagaagatgcagacttaaatgcactaccaacggtagtcactgttgaaaacccatttaaaatcaagcaatattctcgtgtcttcgatgaagacaaaactgataccaatgatgccatgcgaattgctgactacttacgaattcaacgttttacaacgtcacctatcaaagaagaaaaatatatggcacttcaacgtttaacccgtactagatatcaactagttaccgaattagtaacggttaaacaacatttcttagaaaacttaacttataaatgtaatacgcttagtaaggaattaaaatcagaatctaccggcatttttagcgccacaattgtacatttaatgactgaaaactactcattagatgaattagccaatttaccactagaggacttcgtccaattgattcaaaatgttggccgcagtaactttaaaaatcctgaaaaactggttaaaaccattcagcgtgccattaaaaatagctatcagttgccgcgattaatgaatgagtcgattgatattattctcagtaccttggtagttcaaatgcgttcattacagcaaagtattaaacaaattgataaaggtatcgaaaaactagttgaaataattcctgaatatcaatgcttaaccagtgtgccaggaatcggtaaggtttatgccgcaggtatcttagctgaagtcggtcaaatcgaacgatttgatgatcaagcaaaagtcgccaaatatgccggtctatcctggaaagttaaacaatctggaaattatcagtcagaagtcacaccactaacaaaacaaggtaatcattatttacgttattacttagttgaagccgccaactcggtaaaaaatcacttacctgaatacacagctttttataaaaagaaatataccgaaaccccgataaataagcaccgccgagctattgttttaaccgccagaaaatttgtgcgtttggttgatgcgctactacgcaatcaccaactttacacaccaccaaagagtgtgttgaaggaataacgtagttattcacgcaaatctttggaatacctactaaaatttttatgaattttaagtaggcttagtttagtgttgccaattttgtaaaattacacgatatttatatcaattatcttcttgacttattaccactagactttttagtggttaggattgattgcaccgttacgcaagtatgctttgaactggcggtatattggtgcgaagacttcgatatcattttcgttgagcatttctttagggaaatagaagcgttcatcgccgctaaaacggcctgagatggcggccaccaagtcacttaatgatgataactcttcaagttgaccatcagattgtataatttcaatctgagttttgggtgatttagcggagggatcataggcgtcatacggcaaatcgaaactgttattaacagcagtgtaatactcactgttataaccagcttgctcggttagcgcccgtaattctggtaaaacacattgggtctgttggctaaaggcaaccgatttgagtgggcggcggcttaaaaagcggtcggccaaatcattgagcactgaatccggatagtctaaccagtatagaaaataggtattcaaaacgccatcatctaattttaaatagtcttgtagggtgaagttctgttcgaaaaatggaatcaataattgcggtgcgagactctgatgatggtcaggctgttgataaagaacttttgcacgttgcaagagcttttgcaagacaacttccatgccgcgtgaaacaggatggaaataaacttgttgatacatctggaaccgactgacgatgtaatcttcaacggcatgcatcccgtttgctaaaaaggcaatgcccttatcgtaaggccgcatgactcgtaaaacacgcgtcaaatcgaattctccgtatttagtcccagtattgtaagcatcccgtaataagtaatccatgcgatcagcatcaatctggctggaaatcatctggacaacttgtggatttggataagaatgatcgattacactagcgactttcgcagggaaatcatccgcgacttgggttaagacgcgattaatggctgtctccgggttggtgataatttggcgcgtaatcaattcatgatcagtatcgaagatgtgttcgaaggtatgtgaataagcgccatggccgatgtcgtgcaataaagctgcacataaggcgactaaccgttcatcatcgttccaaagtccatcaccggcaacttgactagggtagttaagttgaaattgatcacagatttggcgtgtgatttcataaacacctaatgagtgggtgaagcgggaatgttcagcgccttggaaaacagaggaagtcgtgccaagctgtttaatccgccgaagacgttgaaattcgggggtgtcaattaaatcgagaatcacttgatactcgacgcgaatgtagttatgcacaggatcacggaatactttttcacgcgatagtttaatagcggtgttagtcacaatataatctcctttttgaggcccgttaaacttgataacggtggagtgctgtttgttttttaagtagtagttgttgataagctttcgtttgtaattgtggtgtgaggtcaactagttgtggttgttgaaccaaccggctaaaagcggtctgtaggtgcgtaatggctgttgcaacagtcattggttcgtttaacagatcagataggttggccatggtgtccgggatgaccgctgggaaagtccaccgcgtttggctttgtgcttggccagcagtgtaaaaactgtgcatgagtttgccacgcgcctgttgattgcctgtaatgctggcatataagagtacggcaattccgtttttggcacggcgttgggcaataccggcaaatttttgaccattgatgctgagatcgtattcgccagggcaataggagtgagtgacttcgaaatggtcaatcgtgacgggatagtctgcaaaggcagttgtgaacaattggtgcatgagcgcgtaagcagcattaatgcttaggtgatccgccatatcaggaagatagaagctgacgttcaaaacgccggcatccgtcacaatccccaagccaccagcgttacgcacgaaatgggcatagtgtgcagcctctaatgtggcaaccgcttgtggataagcaggtaactttgtatccatcatgcccaaaataacattgtcagcaagcgtccaaaaatgaataataggttgttgtaattcgcggctcaaagctaagaggctattagcatgagcaaaagcgagtggtccagccgctttttcaaaatgttgggttaaaatagcccattcttgattggcagataaagtcgctaaatcatccatggtaatcacctccgaaaattaaaaactcttcttaattatagcgtaaattctaggcgctgtctgcaatcggtacgttggtcaaagagaattggcggattattctggcgctcaaattttgaatggcttataatagaactacttaattaaaattaaaggaagttatttatggcaagtcaaagcggaattccggtcaaggtacaccttgaaacgcaaattcaacaagatgggcaacttgaaaaacacgttttcgatgaggatggtcaagttgtcaaaatgggagagtcactttacttacgttatctggaacacggtggtgaacaagccaccgcggtacggtttaaattggctgctgacggtcaaattcaattaacgcggggcacagaagaagacgagacgcaattgcggttgtactttaagcaaggtgaagacctcggatcaatttaccaaacaaaatatggcaacatgccagtgctcacaacgacaacccatttattatcgatggtgaaggaacaaccgttatcaggtgaaattacggttcattaccaacttgccatcaataatcaagccgtgggggattacaaattacgattgatttttacagcttaagctagtatgattaaggatagactgttgaaaggacgtgtactggttgaaattagacgtttttaaaggccaaaataaagaagaactatcaatgattgaagtcgcacatgcaattttagaagaaaaaggcgacacgattgcattcgctgacttaacgaatgaaattcaaaactatttaggcaaaagtgatgaagaagtgcgtgcacgcttatcacaattttatacggatttaaatgaagatggtagtttcatttctttaggcgaaaacgtttggggcctccgttcttggtacccatatgaatctgtcgatgaagaagttaaccatccagaagatgaagaagaccaaccaactaagaagaaacgtcgtaagaaggttaatgcattcttagcagatgttaccgacgatgacgatgtgattgattacagtgacgatgatccagaagacgaagacttagatgctgatgatggtgttgatttagcagctacagatgacgttgctggtgatgacttaactgaatacaaagctgacttacaaaacatcggtgacgatgacgatgatgaagacgacgatgccttagaagacggtatcgaaggtcaattatctgaatttagcgatgatgaagacgaagaagacgaagatgacgagctttaattagacgtttccgattcgttgccataaaaaaagacgtcaaagttaactttggcgtcttttttttgcgtttaatatttttaagctaatcctcgtcggatacccgacttacgacacactctcgttcaagaaaatggtaaaccgcgccgattaagttggcgtcttggttgaagtgacaaatttcgatgtgtggcacaggaataggggtggttgcccctgcacggcgttgccagtaacgattaatactactattgtcatcggctaaaagtgcgtcaatcgcagcgtttaattttggtagtaggtcagttcgctgactaatgccaccaccgacaccaataatctcgggcgtgtaagcaacgtttaaaaagagcatgatttccgcaagggcagcatacatctgtgtgacttcttgggtggcaatcggatccccttgatcggcaagttcgaagacggttttgccatcgattgtattggggagtttaaaattacggagggagacagtcttgccaatttggacgggtgagacttttgaattgttgagtgttttaatggcatctgcgatgaatttttcgaagttatcgattttatcagcagtggttttgagaatggtcccattttcgataatggataagccaatcccagaaccaattattgtgaataaggcgctcagatgaccttgaccaatcccagctgtcatctcggcgagtgctgcactgtcggcatcattttggagagagacgggcagaccaaggcgcgttgcaaattcagtttgaaattcaccgaggtgcaaaaatggcacataactcatgccatggatgatgccagtctgttcatctggatcaccaggacaactcaccgcaattccagttaaatgaaagtcggtcgcaaattgatcacgtaattgttcaacttcggaatagaagcgattgcgtgttagcggtgtagggaattgcgcttggttaattagttggtgtttcgtccaaatcccatatttgacggcagaaccgccgatatctagagctagtaacgcgtcttgtagcatggtgggccatcctttcaaagtaggtcatgcaaatagtgtagcataggcgatttaaaatcggcgcagaaatgactaatttttttgcttgacgctaattgccatttcttgtattatattctttgggcgctttgcagttactttaattgcgaagccagaatcggttaacaggctccctgttcattttgaatagggagcttgtttttgtttttggttgtttcccaaaagcatgaatgtttagcgtaatgctaagaagaaaaggagaatatttatatgaccaaatatgtttttgtaacaggtggcgttgtttcttcacttggtaaaggaattgttgcggcttcacttggtcgtttgttaaagaatcgtggattaaaggtaacgattcaaaaatttgatccatacatcaacgtggatcccggtacaatgagtccttaccaacatggtgaagttttcgtaacagatgatggtactgaaactgatttagatcttggccattacgaacgttttatcgataataatttaaataaatattctaacgtgacgacaggtaaaatttattcagaagttttacgtaaagaacgtaaaggtgaataccttggcgcaactgttcaagtcattccacacatcacaaacatgattaaagaaaaaatcatgcgtgctgctacaacgactgattcagatatcgtgattactgaaatcggtgggactgttggtgatattgaatcactaccattcttagaagcacttcgtcaaatgaaggcggatgttggcgcagaaaactgcatctacattcatacgacattggtcccttacttgaaggctgccggtgaaatgaagaccaaaccaacacaacacagtgttaaagaattacggagcatcgggattcaaccaaacgtcttggtttgtcggactgaaaaaccaattcctgatgacatgcggaacaagattgcccaattctgtgacgttgaaccagaagccgttgttgaatcacgcgatgctgaatcaatctacgatattccattgttattgaagaaccaaggcttagatgattttgtcttgaaccacttcaagatgacagcaccagaagctgacatgacagaatggattgatatgttacacaccatcaagaatcttcaaggtacaaagaagattgccttggttggtaaatatatcgaattgcaagatgcttacatttcagtgaacgaagcattacgccatgccggttatgcttataacaccgatgttaaagtgacaccaatccaatcagaagatattacgaaagaaaatgttgctgaaacattagctggctttgatgggattatcgtccctggtggtttcggtgatcgtggtttagaagggatgatcctttcaattcaatatgcgcgtgaaaatgatgtaccatatcttggtatttgtttagggatgcaaatggcaagtatcgaatttgcccgcaatgttgctggcattacagatgccacaactggcgaagtacacccagaagcaaaacataaattaatcgacatcatgtcagatcaaaaagatttagaaaacatgggtgggacacaacgtcttggtttatacccatgtaaattaaaaccaggtacaaagactgctgctgcttatgataaccaaagtgttatccaacaacgtcaccgtcaccgttatgaattcaataacgaatatcgtgaattgttgacagacaaaggcttagtctttgccgggacttcacctgacaatcgtttagttgaagtgatcgaaattccagaaaacaaattcttcgtggcagcccaatatcacccagaattcctatcacgtccaaacaaaccagaaggcttgttcaaggcatttattggcgcaacaatgtagagtgctgactcgaacgggttggctttgaggattagccacatcaggcggattatcgacaaggtcggtagtatgactgatgtggctaaccggaatatggagcacgtctcataaaagacgctactagtcagcacgacaaagtagcgtctttttgtatgccgaaaaatagttgtgaaaatggagatggtccgttttgaaaagccttacatttttagacttctacagcccaattgaatgcgatgattagcttttactaagtatgaaaattaaaaagtaaatgttatccctaaatgccttgtaatttatgtgctgattaattactattatacatgtatgactaattatcaacggcattgagtagattggagccgtttttcaattttaaaaaataaaactaaaaaattaaaaaacttaaaaatatcaaaagcgccttctggtttaaaccacaggagaagtgggaaactgaaggcggttcttttgttgcagagcgaacggggaaatctaaaaatgaaaaaaatgttaattcaaggtggcaatctcttatctggagaggtcacaattggcggtgcaaagaatagcacggttgcgattattcccgctgctattttggcggagtcgaaagtcgttttagactgtgtgccgcacattaaagacgtcaacagcctactatccattctagaagatatgtctgtctcatctacttttgctgatgacacggttgaaattgatccaacccacattatttcgacaccacttccaagcgggaagattcaaagtttacgcgcctcatattatttcatgggggctttattaggtcgttttggggaagcaatcgttgggttgccaggtggcgacgatattggtccacgaccaattgatcaacatattaaagggtttgaagcacttggtgcgacagtgactaataaccacggtgctatccaaattaaggcaccaaacggcttacacggtgctaaaatttatcttgatatggcatcagttggcgcaacgattaatttattattagccgctgtccgtgctgaaggacaaactgtcattgaaaatgcagcacgcgaacccgaaattgtggatatcgcgacattcttgaacaacatgggtgctaagatccgcggtgctgggactgacattatccgcattgatggggttgaacatctgtatgggcgcaatacacacaccattattcctgatcggattgaagcgggaacttatttaagtatggctgcagccatcggggatggcgtgaacgtcaagaacatcatcagtgaacacatggacgcttacctcgctaagttagaggaaatgggcgttaagatggatgttaaggaagatagtatcttcgtttatccatcacctaatttaaaaatggttcaaattaaaactatgccatatcctggctttgcaacggatttgcaacaaccactaacgccgctcttattaaaagcgcaaggtgaaggcattgtggttgataccctttatcctaaacgaacacgccacgtcccagaattaattcggatgggtgcagatatctcaatcgaaaatgatgtgattattttacatcatgccgacaagttacaaggtgccgaagtatccgccgatgaaattcggggcggtgcttgtttaatgatcgctggcttaatggccaatggtgtgacaacgattgataacgcaagtaatattttgcggggctatgaccgcgttgttgataaactaacgggtctgggcgcaatcgtcaaaatggttgaagaataagttaaccatctattgttttttgttagcattcatgctaatatttaatggttatgtaaacaaatatctctgacatagcaaatatctcagggcaagacttaagttgtgcatctgaattgatgcagataactttagcaaaaaggagcggaaaagacatgaaacaaggtattcatccagattatcacaaggtagtatttatggattcatcaactggcttcaagttcatctcaggttcaactgctaactcagctgaaactgttgaatgggaagacggtaacacatatccattaatccgtgttgaaatttcatcagattcacatccattctacacaggtaaacaaaagtttactcaagcagatggtcgtgtcgatcgtttcaacaaaaaatatggttttgcagacaagaacgctgccaaataattattttgaaaccggggaatttttccctggttttttttgcctttttttccataaaaatagccaattgcaaacggcaatcagctatttaatcaacattttttgaattcgatgactagcgagacacgctagcaaaatgactgggaaaaattgaatcgggaaaagaaagagtaacaaagtagcagtgacgtacggttgtgccacaatcaccgtacaactgacagcgacaaccgtggcaaccaggaggccgggagtgtatggcaacacaacggcgagacttaaaccgattgccgcacttgcaaagatggctgggaaaattttaccgcctcgccaaccaaaggcaaatagcagattagttagaacggtttttccaagtccgattaagagtaaataaatgaatgattgatctaaaccggatttggtaaaggtgaacaagtagtgttctccagaaaagagtaaataaggcgacaatagaccacaagcacccaagaacccaagaacacaccagcgatcattgtaagtaagaccggccgctgaatcgtatcaaagagccactggcatcattgttctatttttaagaatagattgccaaaaactaaaccgacaattaatgctaaaataagaagtggccaaactattaatgtccaatgaatgattggtgtgtgcagtgtaaatggactttctttggggaagagttggttgaccaaggcgaaaccaagaatcccagttgcggttgtgagaatgtataatagaacttgattgaagtgtgatttgaaatgatcgcgcaaggaggttgtctcaatcgcctcaccaacaccggctagcggtgcgtggaagatggccgctagcatggcaccaatccccatcgtcaaaaacgtttctttttgctgagcggttagtttaagtcgatcgcccaaccaagtgattaggccgccgacgttggtcgagagcgcggcttcagggccaaggctagcgccgcaggctaatacaactaaggcggcgataatgtttttaccgacttgctgttggtaggcaacggacccggtttgtttaaattcgctgagtgtttcatgcattgttttaggataaggcccccaataacgttgcattaagccgacgagtaatccgccaaatagaccaacaagcaacggataaaatggctggttgaaatgcgaataaccgacttgccaaattaagtgtgtactgaaattaatgagggctaaaaaggcggccgctatgccaccaatcaacaatcctaaaagtaagctatataaaacaaaaataattttaaactgcgtggttttagtggtaggtgatgacatagagcctcctagttaagggaattatttatgaactattatgcactacccacgctagtttgaccatagtcgaattgtgagggaaagaataatgaaaatcgatcgattacaagcatttagcgatggcgtttttgccattttattaacactattagtgttagactttaaagtgccggactatcaagcagggcatttgagtcaagcggtgattgcacagtggccaactttggctgcctatgtactatcctttttttatgtggggacattatggttgtttcatcacgattattttgcgaaaataaaacaaactaactggcagttaaacgtgatcaatctcagtattttatttgcagtgacactgattaattacccaactagtttgttgtcggaatcgattgctcaacaaaatggcgctgatattcgatttgcttttacatcgtatgcgattgttgcattagtcatctcagctttgttttgggtattatatcggtatatggcactgcatcatgaactaatgcgtcagtatgaacagcgacacgaggaattttatcaaacgattaaaaatgatcccttacgaagtgtcttgatttacgccattgccattgtcggaattcagattaatagctggctaggggcactgttgattttgctgggcaatatctttcatttcatcgcatacttgcgacttagtcggagtgtcacgctgtatcatttgaatggaaaggatgaataacatggcaaaacaaaaaacaaattggcggtgggtagattggctttatgtcttcaccattgtgagtcaattaatctatattggttattacttagaacaaatgctgactaaccccaaagacaacggaacattgtctttttccgttttacaagtggttgcaggcctggtgattgcgaccttacctattatcattgaacgctttatgccataccggtttccagagattctatatgcagtttatttaatctttgtatactgttcgattttattggggacgggattacatttttatagtcgcttatactactgggataaattcttgcatgtcttgagtgccgggttattggcgggcttagggtatacggtctttaacgtattgatttcaaaacaactccgtcaaaccatttcagccttactcatgagtttgtttgcggcaacgtttgggagtacgattggtgtgttgtgggaattctatgaatttaccggcgatagtttgttaggcttaaacatgcaacgttatatggcaaaaggtcaccttttattaggccaagcagccttgttagacacgatgggggacttactagcggatgtcttgggatcatgtttaatcgccattatcggctatttctgtattaaacataaccgggactggttagataaactgacgtttaccaaaaaatagagtgcgtttgtggcgcttatattttgagcattaactggatttgacgaattggcgattgtaatcaccgatttggcaaattctgttaagcgcagaaatatgccacaaaaagcacgtttcaacaaaaaagtggtgtcgctctgaaaatgagcgacaccacttttttgtattatttttgtatttcatgttcttcgcgtaagacttttgtattctgacgcacccagaagaggttgacgattactaaaacggttgtcgataggaaaaccccgctgtaaccgaataggccagaaacgctggaaccaattaaaggtccggcgacattccccattgcttggaaggattggttataactgaaaatccgtccggcggaactatggggtgagtacttcgcaagaatcgtttgaacttgcggtaacaatgcggcatcggcgaccccaaccagcagacgcagggcaccgagttgccaaacattttgaacgaaagcttgcggaacgtaaacgaagacggcgaagatcaagccaccgagtaaaattttctcggaaccgatccgatcgccaagtgcaccaaaacgcggcgcggcaattaaggttgcgatccctggagtagccgcgacaactccgctgactaacgctacgttattgccatgatgcattaattgacggacatataaactcaacagcgggctaattgagttgttggaggcttgaataatcattgtggtgacgaacatgccgataattaaatgcgggtatttcaattcatgaatcagttgccgaccgggtacttgatcgcctttttggactggcgtgaagtcttcgtgaacgaaaaccagacagaggataaagacgatgaacaagatggtaccggtaatgaagaaggttgttcgatagccggttgcttgggcgataatcccacccaacaacgggcctaataaggttccggaaacacttccggtggtcagggtgcctaaagcttgaccacttttttcttgtggtgctgaagtggcaattaaggcgtttgaattactgatataacccgagaagaagccttgtaatagtcgcaaaccaattaattcataaatattttggactaagcccatcgcacccaggacaatcgctagtcctaatgaggcgcggagtaacattaatttgcgaccacggcggtcagcaattttgccccaccatggtgaaatcagagcggtaaccaagaaggtaatagaataggtcaccccactccataaactcagttgggccgttgtaaagttgccaagtgtgtcaatgtataacgacataaatggcataatcaaactaaaagcaaccccggccatgaaattaccaaaccataaaacgacgaggttctgttcccattgtgcgcggcgtctgaataaacgttgacgaatgttagtcaacatggtgtcatcatctcgattctaaaaagttaaagcggcgaccacgcttgctgatgtgcgtggtaggcgtcttttaagtgtgggagttgttcaaagagggcagtcagttgcgcatctttagctcgtggcagctggcgtttaaagtacaaccgctgagtgtcgtaggcagtcaatgcgcttgcttgttgggctggtgtaccgtgttcggcaaaatagagtagccaatcaaacagccattctttatcagcatcggcttcataacgggctagcaaagtgtctagctgtgctccctgtgccactaacaagtaatggttacgctgcaaaggggttaactcattatctggatttagatcaattactttgggacctaattgttcgagaaaactatccagcgaatcagcaacggttaaccattgatcgacctcagtatctatgtagcgaatcggtggttcagctgaggcttgttggcaatcaaatacaaagtactgctgttgatgctgactaaaagggactaagtaatcgggcaagtcgggggcttggatgactgcttcaccgttgtgagcaatcccagctaaataatgacactcaacgtcggcgagaccatcacttgttggctcactcgtaggaaggctaaagttagtcaaaaaaccgccattggttgtttgacaaagtgcctgataactcatgggaatccgagggtcatcgacaatcatccgtggtgcagttaaatcaacattcgcaattgctggctgtgcagtaaacatgcaagtatccctcccaaaattggtaactctttaattttaccatttatgtcaaaccaaggttttgttaaggttggcaacctattctttatttgttgtagcgagtctgataatatgaagacaacattaaagaaaagaggatacgcgtatgttgtggtttattattatcattattttgttagtggttggcgcggttggcttctatatcagcacctacaataacatggtcaagagtcggaactggacagatgaagcatggagccaaatcgatgtacaactcaaacggcggaatgacttgattccaaacttagtatcgaccgtgaaaggttatgctaagcatgaacaagacacgttggaaaaagtcatcaagatgcggaatcaattggttgaaatgccagctgataatcggcaagcaacaatggaggcttctaatcaattaacggattcattgaaaagcgttttcgccttgtcagaaagctatccagatttaaaagcggacgcagaatttacgaagttaatggaagaattgacgaatacggaaaataaaattgcgtatgcacgtcaattgtttaactcaagtgctacccgttacaacaaccaaattcaaactttccctggtaatattttggcaggtgctcacaatttccaaaagacagcttacttagaaacgccagttgaggaaaaagcagcacctaaagtttcctttgaatagggtgtgattgggaatgttatttgaacaaattcaacagaacaaacgtaaaacggtatatgtgatgattggcttttttgctttagtattggcaattggggctgcattagggtatctgtttatgcgtaatttgattagtggtgtcgtggtggcggctattttagccgccgtttatatggcgatgatgattggaaactcaaccaacgttgttatgcagatgaatcatgcgaccgaagtccatgatgctagcgaatatcctgatttatggcacattgttgaagacatggcgatggtcgcccaagtaccgataccccgggttttcattgttgacgatcctagcccaaacgcgtttgcaacaggcaatgatccacaacacgctgcggtggcggtcacgactggcatcatggcgcgtttgaatcgggaggaactcgagggggtaattgctcacgaagtctcccatattcgcaattacgatattcggttacaaacgattgccttggcactttctgcggtgatttcaatgctcgtgaacatcggcagcaacatgttatggtggggcggcggccgcagtcgtgataacgaccgtgaagaaggtgcaagtaatatcatcggtttggttttttcgatcctattgttgatattgggacctttggcggctagtattgcacagatggcgttgtcgcgaaatcgggaatacttggctgatgcatctggtgtcgaattaacgcggaacccacaaggtttgatcaatgcgttattaaagatttctgacagtgagccaatgcaagctgcggatccatcaagcgcagctttgtatatctcagatccatttaaaggacttagtcggtcgggtgctcatttatttgatagtcatccaccgattgaagaacgagtcgctaaattaagagcgatgtaatgttttaaagacataacgcatcagctgtaggtaatagttgatagaacacgttttatatagagggaggcaaaattcatttttgtccctctctttttttgtataataaaggaaaagaggagtgatcagtgtgcgattatccccaatccagcagttaatggcgttacaatctactctaataatgcaattgaatgagacaccgagcaaacagattaccatgattgatttaccggttgtgcgtgggcaattgttattggcattgcatgcgcgtcaccagctaacattatcgacgcaacaacgcacaatgattcaacgcgccatcatcacaacgctggcaactaaaacggatggcactcaattaatggatctttggcggcaaacactaccgcagcggtatcggattgttgatcaggcagaggtggtggcccattttgaacagttagaacgcgctaattgggacgttgcgagtttacgcgcttatgcaacccatttaacgggacaacttgctgcgcaaccaacagcgcttaaaaggattttgcaacacaattggcaagcattacatcaagtaggctcagcactttatcaaatgctttttgaagcatacggggaccgaactgcacaaccagtaattaattaccagcggatcaatttagtgctcacgcatttaggggcgcagttggatgagcatgcgtttttgcaattaacagcacgtgattatcaacttgacccgcaattagcaccagatgcgccttttttagcaacctttgcgcaaagtgtgcaacgtgcatttgtcggtcgagttttaaccgataaacggattcatcaattcagaatgtatttagatcggcagaatctacgctatatccgccattattttcaacactctggtgaaacagatgaacaagccttagcgcggtttgtgcgaaaacgacaagcgacccagccacattattggctgcggcgtgaaccagctcggctccataataaataccgcaacggacagcgcccaacaacgcattggaatcgaaaacgactcacgccggattttcatagtgaatttattctagcaccatctggagcatttatcagtcaatggcaagtgcttaaagtaaaggcggatggtctgattgatagtaatcctgaccgttaccagctagatgatggcacactccggcaactactaaacggtgaatcgtttaattatgctaatcggaatgatcggcaacacgcccggttagatagccaaccaccgctgcaaaatgatcatgcactacgcaaaacagcttttaaagggtggcggagtccgactaagcaacaatatcgaccaaatgataaacaggttgatgactattcacggtggtactcttaattggtggtcaatcatttttggggcttttttgaaactatggtacaatattgcgtagtattttaagccataactaaaaaaagcgtgcgtaaaaatgcacacagagtaataggagttattgagatatgaaaatgcagttgggtgaaattgcacgagtcactggggctaaaaacgatattgaacaatgggcaaccattgaagtgacgaatgttgcgtttgacgcacgtcaattaaatgcgggcgctttgtttgtaccgttagctggtatgcgtgatggtcacgactttgttggacaagctaaggaaaatggggcagtggcaactttttgggctgccaatcatgatgcacagccaactgattttcctgtattagtggttacagacccactagcggcttatcagaagttagccatgcattatctccaaaaaattaatcccaaagtggttgcgattaccggtagtaatggtaaaacaacgacgaaagatatgacagctgctgttttaggtagtcagtacaatatgcacaagacacaagctaactttaataatgaaattggtgtgccacaaacgattttatcgatggaagctaatactgaaattttagtgattgagatggggatggatcgcccaggtcaattaaaagcgctcagtgaattagccatgccagatgtcgcagtcattacgatgatcggggaagcccatatcgaatttttcaagacgcgtgataagattgccgatgctaagatggaaatcacagatgggctcaaagaagatggtctattaatttacgctggcgacgaaccgctattgactgaacgggttggcgaactcacaaccgagacattcggtaatttgacgaccaatgacttatatcccttacaagtccgtgcaggtgaaactgaaacgtcattcaagttgaatgcttggccagagatgacgtttacgattccaatgatgggtgcttataatgtcaataatgcgttggccgcaattttggttgggcaacggttccatattaaaccagaattaatgaaaaaagccttggcgaattttgaagtcacaagtaatcggacagagtggcttgttggtcaaaagggtgaacggatgttgagtgatgtttacaattcaaacccaacggctgccaaagaagttttacacaatttcagccattttgagactgacgggcggcggattgccgtcttaggcgacatgttggaacttggtactgccagcaagaaattacacgaaagtttggcccaagaattagatcccacgatgattcaagaggtcttcttgttcggggatgaaattgaaccattatatgtgacgttaaaagagcgttatgcaccagaacgcctccattactttaaccgccatgaacaaacgcaattaattgctggcttgcaagcgcaggtacaacctgacgatttaatcgttttaaaggcaagtcatggcttacatttagaaaaagtagtcgctgctttacaagatactgaagttaattaatgattagcaattgacagacaactgcacaggcacgctgtttagcgattgaagctatggaattagattaacaattggagcaattccgtttgctaattaagttgtggcatgataagctattaaggagcttttttaatgaaaaaggcttttgaaaacaattatattacaagacagatttttgaaaatggtgcaattgacgaagtggacctgttttgtaatggcatgttttttacaaaacaaggaggaacactatttgaaattcgcagaattaggtttatcagaaccaattatgaaagccatcgaacgcgctggctttgaagaagcaacacccatccaaggcgaaacaatcccattggcattagctggtaaggatgttatcggtcaagcacaaactggtaccggtaagacagccgcttttggtttaccaatcttacaaaacttagacttagacaatcctaacattcaagcattgatcatttcaccaacgcgtgaattagcaatccaaacacaagaagaactttatcgcttaggtcgcgaccgtaaagcgaaagtacaagttgtatacggtggggctgacattcgtcgccaaatccgctcattaaaagatcacccacaaattcttgttgggacaccgggtcgtttattggatcatatcaaccgtcgcacagttaaattagaccacgtgaaaacattggtcttagatgaagctgacgaaatgttagacatgggcttcgttgatgatatcgaaagcatcatcaaacaagtgccagaccaacgtcaaacacttttattctcagcaacattaccagcaccaatcatgaaaatcggtaagagcttcatgactaaccctgaaatgatcaaagtgaagtcaaaagaattaacggctgacttaattgatcaatactatgtgcgggcaaaggacttcgaaaaattcgacattatgacgcgtttattcgatgttcaatcacctgaattaacattaatctttggtcggacaaaacggcgtgttgatgaattaacacgcggtttgaaggctcgtggttacaatgctgaagggattcacggtgatttatcacaacaaaaacggatgagcgtcttgaaatcatttaaggctggccgtttagatatcttagtggcaacagacgttgctgctcgtggtcttgatatctcaggtgtgacccatgtttataactacgatattcctcaagatcctgatagttatgttcaccggattggccggacaggtcgtgccggtaagtcaggcgtttcagttacttttgtaacaccaaacgaaatggaatacttacacatcatcgaaaacttaacgaagaaacggatgttaccattacaaccacctacagaaaaagaagccttcaagggccaattagctgcagcggttgcagacatcaactcaatgattgaaaaaggccaattggctaaattcagtgaagaagctgaagaattattgaaacaattctctgacgttgaattagcttcagtgcttttgaagacaatcagcaaggaatcagttcctgttaagataacaccagaacgtccattgccttcacgtaaaaaaggtggcaatcgtagcggcaaccggaatggcggcggcaatcgtcgtggcggtaacggtggcggctatcgcggtggcaatcgtcgtggtaatggcgatggcaaacgtcgtggtaatgacaacaaagacggtcgtcgcaacagtggcaacggcgatagcagcaaacgtcgtagcaatgacaatcgtgacaaccgtaagaagactgatggccgttcaaaacggaacttcacaattcggacaaacgataaataagactttttaaaaacagcgggcggccaacttggtcggccgctgttttcatatagtcaattgtgacagagatgtaagttcagtctctgtcttttttgtggtaaactaattaaaaatagggtactaggggcgaagacgatgattgctggattaggcattgatttagccgaaattgatcgatttgaaaaagcacagagtaagaatagtcattttgctgaaaaagtattaacagctaaggaatatgaactgtttaaacggtatacggggcgccgtgcgttagaatttttagcggggcgctttgcagtgaaggaagcttttagtaaagcttatgggactggtattggacaggtacaactgcaagcgattgaaacgttaaatgatgcaaagggcaaaccctacatcaaacaagatttatttgagggaactgtccacgtatcactttcgcatacaacgacgttagtgatggcagaagttattttggaaagaggttgagacgatgacagtcggctacttacgaccaacacgcattctagttgatcaaaacgcaatttatgaaaatattcaaaatgaactaaaggatttaaaaggcacagatgcagtgattttccctgtcttaaaagcaaatgcttatgggcatggcatgattcctgttgcagaagcggcccaagcggctggtgctgcaggattttgtgtggctattttagatgaggccttagctttacggcgtgctaactttacggaacccattttggtgctagggattacacagcccaccgaaatcgaattggtgattgccaaccaaatctccattacggtcggctcactcgaatggttgcaagctgcttacgaaattgcccaacaaataccttatccacaaccaatgcacattcatttgagtgtggatagtggtatggggcgaattggttttagaaatgcgactgaattactagcagcagccacatttatcaaagcacatgcgaaatattttgatttagaagggatttttacccatttcgcaactgcggatgatcccgatgatacttattttaaagaacaaagtgcccggtttaatgaactagtagccgtgttaccagaatgtccacgatttgtgcatgtttcgaattcagccacgagtttatggcactcagcttgcaatgagaatttaattcgaatgggaattagtatgtacggattgaatccttcagggaatgcgattcctgaattgccttatgcattgaaaccggcgctaagtcttgaatcagaattggtctttgttaagcaagttgaagccggaagtaagattggttacggtgcgacttatgaagcgagtgaatctgaatggattgggacgattccaatcggttacgccgatggttggtctagacggatgcaaggctcaaccgttttggtggatggacatcggtgtgaaattgtcggtcgggtctgcatggatcaattgatgattcggttacctaagcaatatccagtggggaccaaagtagtttttgttggtaaaagtggtgatgacgaaattactttacaagagatcgcagattatgcagggacgattcactatgaaattatctgtggtttatctgatcggttaccacgggtttacagtggaattgatgaacattaagaatttgattatcgccagttctgtggtaggatgaataaaggttaaagtgttgattcggaggttgatgcagatgaaagctaaccgtgaacaactatccgttaaattagacgttgagttggtccaagcaattaagcagtattgtgaggtgtatgcccttgatgagagtgatttgattcaagatgcgcttcacgaattcatggcgaccagacagtcaaaagtagataacgtcattaacgggtacgctgagatggctagcatcaacagtcaaattgcggctgaatttaacgcttgcgaaagtgaggcgtacgcacacattcgcgtagttgattgatcctaattggagggagaacaagtgggagaattaatacagcgtggcgatattttttatgcggatttatcaccagtggtcggttcagaacaagggggcatgcgtcctgttttaatcattcaaaatgatgtgggtaatcaccatagtccaaccgtaatcgttgccgcgattacagcaaagattcaaaaaccgaaattaccaacacacgttgggattacggccaaggataatggtgtcgaacgcgactccgtgattttattagaacaggtacgaacgattgataaacaacgcttgaaagatcgcgtcacacatttagtggcggataaaatggcacaagtcgatcgggcgctcaccattagtgttggacttaaagcggtcttaaatccttaatacataaataccaaaaagaaagaatgaagagaacccgcttataaaagcgggttctcttttttttgacctttatcaacagccggtaaatatgatatgatggtagctgttcgaaaaaacgtggttcgtaaccatcccacgcaaaaaaactaggaggattcaaagatgacgaatcaaagtcgattaaaaacggtgattctaaacgggttagtggcagcattatacgttgttttatcgttattcccaggtatgttgggatttgcttcaggagccattcaatttagaatttcggaaggcttaaaccatttagtggtcttcaataagaaatatctatggggtgttttcggtggggtattagtgttcaatttctttttcagttctgaaaacaagttactcgatacgctttttggtggcgggcaaactttattggcgctgcttgtattaacgcttgtgatgccctatttaaaacaaacttggcaaaaaatggtggtcaatattctcttgttcaccgtttcgatgtgtatgattgcgtggatgattgtgttaaccggttctactgctagcacacacattccattctggccaacgtatatttcgttggcactttcagaagcagtcatcatggtgattaccgcaccagtaatgtatgctgtggataaagttgtgcactttgatgcacaaatgaaatcataaagattaaaaagggcagtcctaattaggactgcccttttttgcgttaaactaaatcatcaagtttggagtcatcacggagcgccttatcagattgtaaatcatcgatttcaggaacacgatagccttttttctcgagcttataaacaatctttttcaaaatctcaagatcaagtccagcaggtaaggtgaaaagggtgcgtcgtacgaattcatcttgcttagcatctaaggtgatgcagctggcgattgaggtatatttagcgataatcttcgacatggcaaccaaatcaccttgttcaccagaagaaagcacagtgagtacatagctacttaattcgagattccacgcttcagaaagcatatttaataacgtgctatgcgtgagaattccgtaaaaattgctatcttcgtctaatacggcgatgtatggcaaatctttaatgttgaagaatactttgaaaaacggtgcgtcaactggaatatacttggtcatattcttcaataagctggtcacgggaagctgcatatcgcccccttgagacttatgacggtagatgtgcatcttatagatgttaccgcggaagatcttgccgctagcatctaggacgggcacacaacggtaaccagactcttctagtagctgtaatgcttcttctaaggtcaccgattcaacaattgtggtgagacgttctttaggtaaaactagggatttaatgagcataggctttctccttagattaaaattctctcatatactaatgtaatcatagcataccaccaagcagattaaaataactagtttttcgactcagcgaaaacttgattagtaatcgatgagaaagaacgtgaaatctaagcaataaaaaagcagggataaaagttaattttattcctactttgtatttaatcgttgagcttactttttctaaacgaattctgtaggtcagctacctctggttaatccgtagaggagaggtgttgctagtacactacgtctaaatcactacaactggaatgccttcgctaacagtatcgtagagtttagccattgtgccaggtggggtattgatacagccgtgtgagccgtgttctttataccagtcaccaccgtacttaggttgccatggcgaatcatgaatcccaacgccagtttcatcgattggcatccagtaattaactgggcttgcgtattcgctgaccccatcaaagttcttccccttcaatgtggcattgcgttctttcttccaaacgctccaaacaccggttggggtgacttgtggtggacgtgctgaaacgatatcagtgtcaattgtgaccttaccatcttgatagagccacatatgttgggcttttaaatcaatttcgatgtaggttgaaccgacactacgcgttttctgatcagttccggaaccacggataacagctgttcttgagaaatctttgcccttaggcacttctgtcattaaggcgtggatttcatcggcaggagagatactccacccataaattccagctgggacagcgactgtgccttcttttgtagaattgaaggtcaaatctttgtcaaaagtatcatactttgcctttaattgataaacgtatttggtaacggcagctttatctagactaattgtaccattgttatacgttaaccaactttggatgtcttctttaggaacttggaaatcattaccattaactgaatagctgattttttcattagcaatcgtcttcaattgatcggcagtttttttcaattgcttgtccgtagatttcacttcaggttgcgcataatcgttttttaagtcgattgttgcttgaccttggttaataccgtgggcaactgcttttttgaacttagcggcatcaattgtgttcccgtagacttcttttacgagatcgaactgatgattctcgaggttaatatgggcattctctgaaggtttgcgatcagcgttgaccttttcgagggtttccgttgagaatttgttaaaatcagcggcatttaaaatgagtgcgtcttctgatttagttgtttgttcactggcaaaaacgtggcctagccaagaccaaccgttctggcttttttcaatcttttccaataacggtttaaaattatggctaaagccagcttcttgaccgctaaaagttagcaatgtttgattgttatcctttagcgtatatttttgacgattcactttttttaagagttctgtgttagcgtctgcgactgattggccactaatgttgacaccggcaacggtcgtatgtggcaagaatgctttttgataatgaagactgactgccgagtaacctccaacaaggataacggctgctacgccaagggcgacgtaggctttcttcgtaagtttcacaacctcaactccaatctctgcataggttaatcataccccagtatcacataaaatacaaaggcgttaactaatagttagcatacaagatatgcacccaaaaagaaataaaaaagtattatttttaataaaaaatatgtagttgataatattaacaccataaaaaaatgactctcattaaatgagagtcgtttgaccaacagcaaagagcttattggcgagtttcgatatctaattcagcaaatgcttttgtaacgatatcttttaattgttttgcagaacggtgcatgctttccatttcgtggtctgtcaatggaatttcaaggatgcttgtgatacctgagcggttaataacagcaggtgaaccgataaagatatcgttcaagccgtattggccttccatgtatacagataatggtaagacagcattttcgtcgtctaagatagccttagtaatacgagctaatgcagtaccgataccgtagaatgtagcaccttttaagttaatgattgtgtaagcagcgtcacgaacactttcgaagatcttaacaagttcttcttctttaatttctggatgagctttaacccattcagaaatcttgataccaccgatgttagcgtgtgaccatacagggaattctgtatcaccatgttcacccatgatataagcatggaccgaacgtgcgtcaacgttaaccatttcagcgatgtctttacggaaacgagctgagtcaagtgatgtacctgaaccgataacgcgttctttagggaaacctgataatttccatgtagcgtatgtcaagatatcaactgggttagcagcaactaagaagataccgttaaagccagattcaacgattgggtcaacgattgtcttcaagattttaaggtttttacttactaagtctaaacgtgtttcacctggtttttgtggtgcgccagctgtgataacaacaacgtcagcatcttttgcatctgagtattcagcagcatagattttcttaggagaagtgaaagctaatgcatcagataaatcgattgcatcaccttgtgttttttctttaaagatatctacgataccaacttcttgtgcaataccttgtaaagttaatgcataagcgtaactagaacctacagcgccgtcgccgacgaggataactttttggtgatctttttcaatgtttgccaatataatgacgtcctttctgtaaatcaattcttcatttcgaaaaccagtatagcataatttacaccaaagttcgcgatttttggttaaattttcagaaaactatttctttcacaaagagagaaataaactgaatatggtataatggttcttaatatcaactggcgactggggagaattaactgctcagaatttttgcgtgatagcgccagtcaaaaagaggacgttaataatgaaaatgattgttggcttgggaaacccaggcagtaagtatgcaaagacaaaacacaacattggttttatggtgattgatcaattatgcgaacggtttaatgtgaccttaaacaagcatgattttgaagctgaatacgggagctttaaatatgaaggggaaacgattctcttagtgaaaccactaacgtttatgaatgattccggtcgttcagtcgggcctttaatgaaatactaccaagttaacctagatgaattagtagttatccaagatgatatggacttaacgctaggcaagttgcgcttacggcaaaaaggttcagcgggaggccacaacggcattaagagtatcatcgcaagtgtccaaagctcagaatttaagcgtgtcaaagttgggattcaacatccacaaaaaagtacagtcgttaactgggtcttaacgccgtttgacaaagacagcgcaccaattatcaatcaagcactagaccaggcatgcgaagcactagaagactggtgccaaaacgacgacttcatgaaaacgatgaataaatttaattagagtgtcgttggcagttggtcagattctgagcatttgcctaacttggcgaattgacgctgcaagcggcgatttgaaaagtgtagcaaagcgcaggaatctactgccaatgacacgtttcaaaaacagagtgcgtttggttgcggttagcaacagagcacgtttcttcgcgccattataataagaaagtaaaggaacttttacatggatttaatgacaatgctagggcagaccaaacaggtgcaatccgttttaaagaatcaacgaccagggattaaacaactacttacagggctttcgggatcagcgaaaaccctgtttttggcgacgatttataaacaacaacccttattgattattgagagtaatacgttccaagccaatcaagttgctgatgatttgagtaatttactcaatagtgatcagatttacactttcccagttgaagaagtgatggcggctgaaatggcagttagttcacctgagtccagagcggaacgtgtgcgaacgttgagttttttagcaacaggcaaaaaaggaattgtgattacatcggtcgcgggcatgcggcggttattacctacagcgcgtcagtggcaagatagtcaactcacaatcaataccgatagtgaagttgatccccaggcacttgctgcgcaacttggtgaaatgggttatttccgagataagttggttggtaaacctggtgagttcgcaatgcggggggatattattgacatttttccactggacgcggaaaatccggtccggattgaactctttgatactgaagtggattcactgcgttcttttgaagcagatacgcaacggagtattgagaatttagatagtgttcaaattatgccggcgactgacttattggccaacacagcacaattggaaatggctggtgaggcattacaagcagcttatgaggcggttgcggccaaaataacggataaaactgaacaaaaacaattggcgacaaactttgaaacaccgattgaacggttgttggccggtgaacgcgttgagaatttagcgttgtttgttgattatctgtatccagatcaatcaagtctgattgattactttaaaaagagtggcttagtgatttttgatgactatccgcgcattttagaaacgcagcggattttgactgaagaagcggccaactggcaaaccgatatgttggaaacccaccgcatgttgccagaccaacgactcatgatggatgcccaagcgctcatcaaaaaagatacacatgcgcatctctatctatcactgttccaaaagggaatggggaagttaaaactcgatgcactcaacaatttacccacgcggacggtgcaacaattctttagccaaatgccgcttttgaaaaccgagattgcgcattggcaaaagcaaaaacaaacggtcattgtgctcgtgtctgatcctaaacgggtcaagaagattgatcagacgttccacgactttgaaattgatgccgtcatcgccaataagactcagttggagacggggcggacacaaatcattcaagggtcacttcaaaatggctttgaattaccggatttaaaactggtggtcttaactgaaaaggaactgttcaatacggcgccgaagaaaaaagtccggcggcaaaccttggccaatgcagaacggttaaagagttataacgaattaaaaccaggtgattacgtggtccacgtcaatcatgggattggcgaatacgtcggcatggaaaccttggaagtcgatggggttcatcaagactacatcaccatcttgtatcgggataatgggaagttatttatcccagtcactcaactcaatatggtgcaaaaatacgtctctgccgaggccaaaacaccgaagattaataagcttggcggtggcgagtggcaaaagactaagagtaaagtttcggcaaagattgaagatatcgccgatgatttaatcgaactttatgcgcaacgggaggctgaaaagggatttgcctttccaaaagatgatcaattacaggctgaatttgaaggccagttcccctatcctgaaacagatgatcaattacgcagtaccgctgaaatcaagcatgatatggaacgcgtccgtccaatggatcgattattagtcggcgacgttggctttgggaaaacggaagtcgctttgcgggcggcttttaaggctgttgaagccggtaaacaggtggcctttttagtgccaacaacgattctggcgcaacaacattatgaaaacatgctgacacgcttcgcggattttgcggtcgaaattggtttactgtcacggtttaaaacgcgcaaagaagtgacggcaacgctcaaaggcttagcagagggcaaagtcgacatcgtgattggcacccaccgcttgttatcgcaagacatcaagtttaaagatcttggcttgttgattgtcgatgaagagcaacgctttggtgtaaaacacaaagaacgacttaagcagttgaaggcacaagttgacgtgttaacgttgacggcaacgccgattccacggacgttacacatgtcgatgctcggtgtgcgtgatttatctgtgattgaaacgccaccgactaaccgctatcctatccaaacgtatgtcatggaacaaaatgccggtgcgatgcgcgaagcgattgaacgggaattagaacggaatggtcaagtattttacctccataatcgagtgagtgacattgaacgcacggtcgatgagattcaagcgctggttcctgaagcaacggttgggttcgcacatggtcagatgaccgaggcacaactagaaggtgtcatctacgactttgtccaaggtaaatacgacgtcttggtgacaaccacgattattgaaaccggggttgacatgcctaacgtcaatacgatgattgttgaagatgctgatcattacggtctttcacagctctatcaattacgcggccggattggacgtagtagccggattgcttacggttactttatgtataaacccgataaggttttaacggaagttagtgagaaacgacttcaggccatcaaggactttaccgaattagggtccgggtttaaaattgcgatgcgtgatttatcgattcggggagctggtaatttattaggtaagcaacaacatggttttatcgattctgttgggtttgacctatactcgcaaatgttgggtgaggccgtcgctaagaaacaagggaagcaagtcgttgctaaaacgaatgccgaaattgatcttaaactagaagcttacttaccagacgcgtatattaatgatcaacgccaaaaaattgaaatttataaacggattcgccagatggattcagaagcggcctttgatgaaattcaggccgatttaattgaccggttcggtgattatccagatcaagtcgctaatttattagcgattggtcagttgaagatgaatgcagatgacgcgttaatcgaaaccatcaaacaaacgaaagaaatcattcaagtcaccttatcggcgaagggcagtcgccttgtttcaggtgaacaaatttttgaagcgttatcgacaacccgcttgaaagcaacggtcgggtttgaacaagaacaattaagcgtgaaactcgtcatccagccgaagatgcaaccggcagattggttgagtgaagtggcaacttttgttacaagtctcttgaagatagaacaaaagcacacggaacaaccaacggattaggcacgctaagtggaggccaggcatgcaaaataaacagatgcaacatctgatgaaaggcgcggtcattttatcaattgcgtcgtttatcgcgaaggtattaagtgccgtttatcggattccatttcaaaatatggtcggtaacaccggcttttacgtgtatcaacaagtctatccaatctatggcattggcatgacgtttgcacttagtggctttccagtttatatttcgaaactggttgctgaacaagtcaatccggaggaacaaacgcagctgttaagacgctcatttgcactgttaggcatctttggtgctgcaatcttcatttatttacagtatcaagcgccgaaaattgcgggggcgatggcggatccagcattaacaccgctgattgaaatggtatcgtttatgtttttattgatgccgtttctagcggtgacgcgggggtacttccaaggaattttcaatatggtaccgacggcggtttcacaagttgctgagcaactcgtgcgggtcgtggtcatcttggtggcagcgtggctatctttgaaactgcactggtcagtgtatgaaatgggcacatgggcgatgtcaggcgccttctttggcggcttggttgcaacctatattttattacggccagcagaaaccgcctttcaactcaaggcgccacaccgtggtggcatcgattttaaggcgtatcaacaattggcaaaacgcttagcgattgaaggcgggtcaatttgcctctttgcttcattaattgtgttattacagctggttgattccttcacagttaaaaaagggttggtcctcagtggattatcggaagaacttgctaagaatatgaaggggatttttgaccgtgggcaaccacttgtccagctgggattagtcgtgtcacttgccttctcatcaacgttgattccgagtctgtcacaagcgcggcaacggcggcaacaatatcaatttcaacaagttgctgaagcgctgattcatatcagtttaggtttatcggcagcagcaaccaccggcctaatggttttgatgccgcagattaattatttcttattcggggatgctgatggtaatcaggcattggtttggtatatgttgagtatcgcaatcatcgcgctgatcaatgcttgcaactcggtgctccaaagtcttgatcagttccacaaaacaacggcagccttaattgttgggttaatcgttaaagtagcaatcaatcaatggcttgtgcaacactatcaaattgttggcgcgagtgtcgggactgttatcagcctcggtgttgtgttagccttaattttacggcaatcaccagtgattgtacgtcaagcacttggtttgcaacgctttaccggtaagttacttgcgatttgtgcagtgatgtggctgggtgttaagattgcgctacagtttgcaccacaatcacttagttccagaggacatgcgattttagggacgggccttggcgtactcgttggtgtgctcctatttggcggattagcattacggtggcaattattctcgattcgagaatggctgacgatgccaggtggccggcaactattgcgcctttcgaaaaaaataaaaggtaggacaaaataatgcgcttagataaatttttgaaagtatcacgaatcattaaacgacgttcagttgcgaaagaaattgcagacaagggtcgaatcatgattaatgatcgccccgcaaaatcttcaagcaatgtcatcgtgggtgataaactggaaatcggatttggtaataaaacgatggtcgtacgcatcacacagatcatcgaaactacgaagaaaagcgatgcagctgaaatgtatgaaattttggaaacaagacaagctgaaaactttgattaaggaaaaagcgctggccgaattaatatgggccggtgcttttttttgtgactttgttgagcatcttaataaaagtcattaagaatctgggatcttagttgacgacctttttgtgaaattgctataatgaacttaattccgagatggggggcttctaagtgagtcgaaaaattgcgaaaatcgagaatgcatttacccagcaacaagcagcccagaaaatcgtgcaagacaaggcagcccatgttaagcgtgttcataaacgccgcttatgtggcttggggattgttgcagtattagtcgtcttaatttgtggtgtgcagattttccaaacccatcattcattggccgagattagagaaacaacggcagctaaagaaaagacattaaaaaaagctaaagcaactgaatctgatttaaagattcaagtgcaacagctgcatgataatgattacttggccaaatacattcggtacaagtattactattctaaagacggtgaaaccatcttcagtttgccccaggacaaggcgcctaatttaaattagcaacaaaaataattcagaatacgaccttgtttcaagggcaaagcgtgctatacttattttattaaatatcacgcttaagtgattaaaagtttgacgagttcaaacgaccatttaggaggacgtagttttatatggcagttgaagttggttcaaaagttgctggtaaagtaacgggcattacgaattttggtgcttttgtagatttaggtgaaggcaaaaccgggttggtacatattagtgaagtgtccgatagttatatcaaagatattcatgatgttttaaccgttggtgatgaagtcacggtgaaggttatgtcagatcaaaacggtaagattggtttatcaatccgcaaagccgttgatcaacctaaagtgcaagaacatccgcgccctcaaagtcgtccaaataataatcgcggtggatatcgcaaaccagagcattcaagcgcacctaaaaaagaaggctttgatgatttattatcagggttcttaaaagatagtgaagatcgcttatcaacgattaaacggaatacagaaggtaaacgtggtggccgtggcggccgtcgcagttaatagaacaaattgataaaggttggcttgaaagtttagtgatagactttcggggcaacctttatttcatttcaagtctgtgttggagaggaatcagtatgttagaacaagcatttcaaacacatcttcaaaaagagcagttctggcaagccggcgacaaggttgtggtggcaacgtcaacgggagtcgattcaatggttttattgtggttattgactcatctgccccaaaaacaacgaccccaagtcgttgtggctcacgttaatcatgaattgcgtgcgcaaagtacggctgaagaaaaatatttaacccagttttgccgattgcatgccatcccgttacgcattcaacattggccaaaagcgagtcatcctgaaacaggggttgaagcggcggcacgtcaatttcgctatgctttttttgatcaagtcatgcgaaccgaatcggcgcattacttggtgaccgcgcatcacggcgacgatcaactagaaaccttgctcatgaaattagttcgtagcggtgaattgcatgaaatgcgggggattcggcaagtcagaccgtttaaaacggggacgttaattcgcccgctattaccttttagtaagcaacaactgcgtgattacgctgatcagattggtttgaggtattacgaagatcaaaccaatcaggaacaaactgttcttcgtaatcggatgcgacatgcggtggtgccacttttaaaacgagaaaatccacacttgattcaaaatgccaatcggttcagtcaaagtctgacccaaatggtggcacaccaagatgatctaaccgcggcgttactgccattgttggcaatcaaaaaacagccggcggcaattgaagggcgtttagaccaactcgatggcttgaaccagacacaacaaagggcgctctggcaattggtgtggcaacgatatttcaagactttaccggcgttaaaggcagcccagttaatgcaagtgcaacaattgttggcgaacccgcagaaaccgcaaggccaagtggcattgaacaatggcatcatttttgaaaagcagtatcggtgttttcggattggtgtccaccaaatagtggattctttggtcaaaacacgaacattagcgattaatgaatggctgcggttaaaaaatggcgaacaagttggtgttttcgatatcgaccatctacctaatcaagttcaacggcaacaggtcgtttggttagcaccagaggaatggccactgcaactcagggcgctacaagcaacagatcgaataatgcttgataaggcacaccacaaaaccattcaacggttatggattgatactaaaaccccacaggcaaagcgccaaaatgcatgggcggtttggaccccaaatcaattgcttggccggccggatttacggatttcggcgttgtttaatcgcgaacaaactggtaaaatacggtacatactatgttatttagatgattaagcaaattacggaggctggcacaatgttagaaaaagatattgaacgcgtattatattcaagagaagacattcaaaaggttaatcagcgcttaggaaaacaaattacagcggattatcaaggtaaaaacccgttattaattggtattttaaagggtgcgatcgtcttcatgacagatttgattcgcgaaattgacctccatgttgaaatcgactttatggatgtgtcaagttatggtgctgagaccatctcgtcaggtgaagttaaaatcatcaaagatttagatacgagtgttaaaggccgcgacattatcattatcgaagatattgtagatactgggcgcacgttgaattacttaatggcaattcttaaaacacgtcaagcaaactcaattaaagtctgcacgttaatggacaaaccaagccgtcgaattgtgccagttcattcggattatgttgggatggaagtcccaaatgaattcgttgtggggtacggattggactatgccgaacgatacagaaatatgggaacaattggcgttttgaaacctgaaatttattcgggtaaataaatggtcaataaaagtcagatatgttatagtttaacagtgtcaaaaggacactgtgtcacaaatgatgagaagcttcaggaggtcacgtatgaacaacaaaaagaatggactgtttagtaatagtctgttttacattattatcttagtggctttagtcggtgtgttctcgttcttcatgaacggtaacgctggatcagagtctaaggaagttcaatcaagtacatttttaagtgaattgaagaccaataaggtcaagtcattctcaattcaaccaacgaatggtatttataaaatttctggagaatatcgtaaagcacaaaaaacagaacagcctaaaaagaatcttttaggacaaaaaacaaaagcaagatcagttaaacacttcacaacaaccttattacaaagtgattcacaagttggggcaatgaccaagttagctgacaaatcagcaaccaaggttgaaacccttcaagaaccacaatctggttggtgggtaagtattttaagtcttgtattgccattgatcatcatgtttggtttattctacatgatgatgggccaagcgggtcaaggtggcggtcaaggcggtcggatgatgaactttggtaagtccaaagctcaaaaagccgacaagaaagctaataaagtacgtttctctgatgtcgctggtgcggaagaagaaaaacaagaattagtcgaagttgttgaattcttaaaaggtccacggaagtttgctgcattaggggctagaattccagcgggtgttcttttagaaggacctccaggtactggtaaaaccttattagctaaagccgttgccggagaagcaggtgtgccattcttctcaatctctggttctgacttcgttgaaatgtttgtcggtgtcggtgcaagccgtgtccgtgatttattcgaacaagccaaaaaagcagccccatcaattatctttattgatgaaattgatgctgttggtcgccaacgtggtgccggcatgggcggtgggcacgatgaacgtgaacaaacattgaaccaaatgttagttgaaatggatgggtttacggggaacgaaggcgtcatcgtcatcgctgctactaaccgttcagatgtcttagatccagcgcttttacgtccaggtcgttttgaccggaagatcctagttggtcgtccagatgttaagggccgtgaagccatcttgaaagtccatgctaagaacaaacctttagccgatgatgttgatttgaaagaaattgcgcaacaaaccccagggttcgttggtgctgatcttgaaaacttattgaacgaagctgctctagtagccgctcgtcgtagcaagaccgatatcgatgcttctgatgttgatgaagctgaagatcgtgtgattgcgggtcctgctaagcgggatcgcgtgattaatcctaaagaacgtgaaaccgtggcttaccacgaagctggtcatgcgatcattggtttagttcttagtgattctcgtgttgttcggaaggtaacaattgtccctcgtggccgtgctggcggatatgccatcatgttaccgaagaatgatcagttcttaatgagtaagaaagaattaacagaacaaattgttgggttacttggtggtcggacagctgaagaaattattttcaactctcaatcaactggtgcttctaacgatttcgaacaagcaacggatattgcccgcgggatggttactcaatatgggatgactgataagctcgggacagtggcccttgaaaaagaaggtcaaccattcgttggtgctgcttacggtcaaggcccagccttctccgaaacaacggcatctgcaattgatagtgaaattcgtcggattattgacgaagcacatcaacaagcacacgaaattattgaagcgcaccgtgaacaacataagttaattgcggaaatgctcttgaagtacgaaacattaaacgaaaaagaaatcttgagcttgttcaatgatggtaagatgccagaaaagaacgctgaagaattcccaagcgaaaaagcagctacttttgaagaagctaagaaggcgcttgaagcaaaagaagccgcaaaagaagattcagaaaaagaaactgataaaaaggatgtgacaatcacacctgatgaagatgatcaatcgacaccagctgaggataatcaacatccagacgatgaagcataaattgttacaccaaaaaggtcgacacgattagtggtcgacctttttgcatcaatccataaaagaggttatttagatgacagattatttaattaaacaaatttcagaagatggccaacttcgtgcttatgcagtgaacgcaactgatgttgtaacggatgcgcaagaaaaacatgacacatggtcaacttcatcagcagcgtttgggcggacgattgtcggcacccttttattgagtgccgctggcttaaaaggtgatacgaagatgacagtcagagttgaaggtgacggcccagtcgggaagattgttgtcgatgggaatgcgcaaggcacagttaaagggtatgtgacgaatccacacgttaacctaccattgaacgacaaaaataaaattgacgttaaaggtggtgttgggacaactggtacgttgagtgtcacgaaagatcttggcttaaaagaaccgtttaccggtcaagtaccattggtatcaggagaattaggtgaagactttacttactaccttgctaaatcagaacaaacaccatctgcagttggcgtttcagtctttgttaatgaagataactcaatcggtgttgctgggggcttcatgattcaaattctcccaggggcggatgaccggttaatcgatatcttagaagcgcggctgaaagaaatgccgctggtgtctgaattactccaacaagggatgagcccagaggaaattatcactgaaattgtgggcgaactcccaatgaagacgttagaaaaaatacctgttaaatacgaatgtgattgttcaaaggatcggtttgcaaaggcactcagttctgttgcgccagcggatttacaacaattaatcgatgaagaccacggtgctgaagcggtttgtcgtttctgtggcaagcaatatcaatttacagaagcagaactaaaggcaattttagccgcgcaatagaatagtcgcaaatttttgcctgaatactatttttttgctatgataatttggatattgtcggaagacacgaagggaatgggttggcattatgacatggcaaataggagacgtgacgattccaaatcaagtagtcgtcgcaccaatggctggtattacaaacgcagcatttcgcgtaactgcaaaggaatttggcgcaggtttagtggtctgtgaaatgatcagtgatcgcggaattatgcacaataatcaaaagacaatggggatgatgtttgttgatccgaacgaacatccagttagcatccaaatttttggtggttcaaaagacaccttagtggaagccgctaaatttgtggaccaacatacacaagctgatattattgatatcaatatgggttgtccagtgaataaagtcgttaagacagatgctggcgcgcgttggttattagatccaaacaaagtttatgaaatggtctcatacgtgacagacgccgtgaagaagccagtaacggttaagatgcggacaggctgggatgaagatcatattttcgctgttgaaaatgcacttgctgccgagcgtgctggtgcttcagcacttgcaatgcacggtcggacccggaaacaaatgtacgccggtcaagcagattgggatattttaaaacaagttaaatctgaattaacgattccatttatgggtaacggtgatgtccggacacctcaagatgctaaacatatgctagacgaagtgggtgctgatgctgtaatgattggccgggctgcgctcggtaatccatggattttaagccaagtggaaacctacttacgaacaggtgaattgattgctgaaccaaccccacgggaaaaaattgcaacggccaagttacaattacaccgtttagtcgaacttaaaggtgaaaatgtggcttgtcgtgaattcagacaacaagctgcctattacttgaaagggattcctcgtgcggctaagaccaaagcggcggttaacgaagtggaaacggaacaagccgttggcgatattttagaccgctttgtagaagaaacagaagcgagaatggcaaattaggttccttatgttggtgttttcgtgttaaaatcaacattagtagataattgaatgtatggaggaattgtcagttgggacaaaaagataatcaaagagaaatgaacgaccaactaaaggtccggcgtgaaaagttacaattgttaaaagatgaaggaattgatccttttggtagtcgttttgatagaacacatatggctgcggaattacacagtgaattcgaagcaattgaaaaagacgatttagatgctaagaatctagaagtcacaattgcaggacggatgatgtctaaacgggggaaagggaaagttggctttgctgacatccgtgaccgttcaggtaaaatccaaatttacgtgcgtaaagatgaagttggcgaagaaaactatttaattttcaaaaaggctgacttaggtgatcatttagggattactgggcaaattatgaagactgacatgggtgagttaactgttaaagcaacgcacctgactttcctttcaaaagcattacgaccattgccagataagttccatggtttaaccaacgtggaacaaatctatcgtcaacgttacttagatttaatcgcaaatccagagagcttggatcggttcacgaaacgcagcaagattatttctgctgtccgtgaatatttagataacaatggctttactgaagttgaaacacctgtcttgcatggtcaagctggtggtgcatcagcacggccatttattacccatcacaatgcgctagacatcaacttgtacttgcggattgcgcttgaacttcatttgaaacgattaatcgttggtgggatggaacgtgtctatgaaattggccgtgtattccggaatgaagggattgatacgaaacacaatcctgaatttacgatgctagaaacatatgctgcatactttgattataaagacgttatggatgaaacagaaggtatcatccgatttgcagcgcacaaggttttaggaactggtcaaatttcatatcaaggacaagcgattgatcttgatggtgattttgcacgggttcacatggtcgatgcaattaaggaaaagacgggtgtcgatttctggcaaccaatgacggttgaagcagcgcgtgaattagctgatcaacaccacgtgaagtatgaatcatactggcaagtggggcacatcattaatgcgttttttgaagaattcgtggaagatacattggtacaaccaaccttcatctatggtcatccagttgaaatctcaccattggctaagaagaatgccgaagatgatcgtttcacagaccgttgggaattatttatgcacggtaacgaatatgcaaatgcctttactgaattaaacgaccctatcgatcaacgtgaacgttttgaagcacaagctaaagaacgtgaaaatgggaacgatgaagccgaaggaatcgatgaagattacatcgaagcattggaatacggaatgccaccgactggcggacttggaatcgggattgatcggttagtcatgttactgacagatgccgcatcaattcgggatgtcttattattcccaacaatgcgtccagacaacaataataacgattaagattaactaaagcccgcaagcagacgatttgcttgcgggctttttttattgaaaaaattgggattataaaaagtttttttagtgtattttgtgggtgaataagctttaattttcggtatattatgttgtttgcgcgagttgttcgtttaatagttcatttatttgcataaattgcggatactagcgactgtttatattatgaaagttcataaataacagttgagattaatagttgacgaaaggctgtagagctgatatagtagtctatgttgtcagcgagataaaacatttttgctaacgagtcaggtaattaaatcagtttgaatatttattcaaaaaatatttaaaaacacttgacagtgttcgttagaaatgatatattaattaagctgtttcg
